United States Patent Application Publication US 2026/0191916 A1 - sequence listing, part 79

SEQ ID NO: 575 - DNA, 4490635 bp, Enterocloster bolteae (residues 1-1,496,879 of 4,490,635)
  source 1..4490635: mol_type = genomic DNA
ttatggaaagctttccataagattaggaaagaaggagggggcgagggagcctttacggtgaccggagtccgctgggaagaaagcaggaaaagagccaaccgggatttcttagagattcataagaagaaaggggctatttatctaaattgtgataacgaggaagatcgtagaaaattagaaatatgcagcttgaagggaaaaagaatattaaatcccatcatcgactggacagaggaggacatctggtgctttatccgtaagtatcaggtgccttattgctgtctgtatgaccaaggcttttgtaggattgggtgcatcggttgccctctggcaagcataagaagccgggaacgggaatttgagcgatatcccaagtaccgcgatgcttacatacgagcttttgaccgtatggtaaaggcgcgtacagccagtggtaaatctaagggaaactggaaggatggtgagagtgtgttccgctggtggatgtatggaaatgaaaaaacagataaacaggttgcaggtcagatggagctaaaggattttatcgacatggcggcttagtcacttcactgggttcgtaaaaggcatcaatgagtggagtaaaacgtattgcacgtaagcacccaatacggccgtaatgtacgtataacgaaagaaggaggaccaaatgaaaaaacaatcgtgtaggaactgccacaatattgatctgaataaaaaagaggaaacagaaggaaggctgagtggacgctaccgttatggctgcaccgtgcaaagaagtgggtttatatgcggctttattatcagcgatgagaaactggaagctttggtatgcccaaactggaaaggagggaagatggaggaggcagactacgaaaggctggcggacgaatttggggaaaggcttcaaactctgtatgaccggtggaatatgtggaaaataagggggtgcccggaggcggatgtgcctgacggagaatatttaaatcgacttcgcagtggaatagaagcgatgatgaggcagattgagaatacgttcgctgaggcagattacccagaatgttattatgctccgcttcctccggttatggatgtggattacatggcgaattgccagcaaattaaagaatccgcaattcgtgcgcttgaagaataccgaaataataaggattatttatggttagcagaccatatccaacatttggataatgaggacaaagaaaacagtgaggcttaccgtctcttgtgtcatgtacaaagtttggaagaagcgatttgcgaagatgcctacttgcagatgaagagagtgagcttccaggaaagcctgtatgatgacctggcaaactgtaaaaggcgtattttgaaaagaaagcgccggccattaaataagaaatcgaaaaaaaatagcccgcagattgttggccagttaagaatcggtgatttgaaggcttcataaggaggaaaagaatggaccatcttatgttagtaaaaaatctgttcaatgatatgtttgtgtttcttaatggtactcaaccactgcctttagaatcgctggatgatgtctaccagggggaaccactatttctggcgctgattggaggattggaccaggcacttttggttgattataatagcgcaatgcaggaaagctatggattctataagaagtattgcggcagagaacttactgaagaggaatgggaacaagtggtagaagaaatccagatgtttattgataaatggaacaatagctggtgtaagggaatgattttggcgttattggcgttgatggaacaggaagaggacgagcggaaaggagaaggaaagatggagcaggcagaaagttccggagatgaagagctggatagcatgaataatgctgcataaagtcagtatagccggggaatggtgaattctccggctgaatttaaaggagtatgacaatgatagaaaaattatataaaaaggttaagaatattcaagattttaacgagacagccagtaagttgcgtcaaatgggactaaaggatgaacttaaaaatcttgccgggaaatataaggttcctgaagtggatttgaaagagttcctctctggaaagcgttatttcctgatagacggaggagagacgcagaaagattatatgtcagcccggagtaagctgttggatgaaatgtttaatctgaatgatcctcaatttacggatgttatcggcaactatctcataaggtgctgtgataaaagcgattttgctgaccttgtgctccagaaacacaagacactgcagcggtgtgttgagtcaatcatgagtcgggcgtatgaaatggtaagcgatgaggtgaaaaacagtggccgatatgcgaacatggctgttttggaagacacagtttttgaatgggtacgggattattatttaacggatgaccgcgaaaaggaggccgagagaagaacggaagcagaagaggctttccacaaacgattgtcggcgcagatgaatactccgaagggaaacaaaaacaaaaccgctaagaaacgcaacgcttccaagaaaaataaaacaggtggagcgaacagcaatgcatctgagaaggaaggaaaatattcttcagccaagacggaggcggctgaccagaataaagaccagattgagggccaggtttctctgttcgagaacggcctggctgaataaggaggaaatgaccatgttgattgcatttaagggctttgataaggatttaacttgtacaaaccacggtaatacataccaatatcgattaggcgtgtggaatgaggaggataaagcaaattgcggaataaatggaatgcattgtgctgaaaacccattggactgtttatcctactatccggactgggacagggcagtgtattacatggttgtcgctgatggtgatattgacgaggatgcatatgacagcaaaattagctgcacccggttgaggcttataaagaaactggacaaaggagaatttgtggctcatagcttaaaatatcttcttgatcatccatttagaaaaaataatcaccttgtgtgtctgaatcaaggcgtggcaaaaaacggtattgtgattgtcagaggaaagaaccctattgccaaaggcacaaaaggagatatcctgggctttgcaaaagaagtgagaagccagtccgagattacagagataggaatacatgttgtggatggaaaagagattcttccagatacttggtatagcatcaatggaaaaataagaaaggcaggataagagtcatgaagaaaacaagactgaaaaagctgggtcatctgtatgcaacagatgaaatgctttgtatggcggaacaggatataccggagaataaaaagattgggtggcaaagagttgagcctgtcttccagcgagaggtatatctgcagagtcaaatttgtgacggtattttggtggttgctatctatttgacgagggatttacggctgggaagtaaaaaaccattatatgaaattttcattgataagagtaaaagagaatatctcacttgggatacagtaaagggaaaatggcggaccgcgtgtgtggaggctcttgaatttccgcattattacagttattcatgtgcctacataacaccagaagaagatattagattggctgaatatctgggagttacccagaagggtatgaaaggtatctaccagtaccagcagtccatcctggaggagcgtctggagaatagatataaaaaagagacatctctatgggaggcggcgatgaatttggtccctgatgttccaaaagattggcttcgctgggtaaacagacatggattgaatgagaattttatattttatgactattcaaaaaatgtgaaagaggggttttgtacctggtgcgagaaaatagtaccagtgaagaaagccagacataatacatatggtacctgtatatgctgcgggcatcgtatccagtataaagctaagggaaaagcagggaggctttgtacaaaagcagaacaggtttatttaccgcaaaagtacggtgatggtcttataatccggcagtttacagcacaacgattttatcagaaaggggagtataaaacaccaaaaataatgtgtaatgaaaccggaagagttatttatgataagaatctaacagacacacagtattactatggcaggtataaacaaagaggataccgctggattaaaggctatcccagttactcgtttttttatggatacaacgattataaactaaaccatgctggtgctgtgtataaacgtacagtaccagcactgtcccgccatatattaaacaggacaggtctgccgcagttgatatctaccggatacaaaataagtcccaatgattatcttagcggcctggctgaggccccgtatctggaacgctttatcaaggcaggactaaaacaccttacgctggatgcactcaattgtcggattgaggtgtcagaatcccatagtttggcaaagtcgctaggaatagacggaaaccgtttgggacggttgcggaataatgatgggggcgaattgtttcttatatggatgcggtatgaaaagaaaaaacgcaaaaatatcgtggattcagtaatttgctattttgaagaacaggatatccgaccggagaatataaaattcatccaggatagaatgagtgaattaagaatatgcaattatctgaaacgtcagtatgcattaactaaccgacctcccctggaacttctatctacctggcaggattatctcaatatgtcaaaacggctgaaacgtgatatcacattggaaatattctataagcccaaaaatctggttgaaagccatgatgaagttctacagttgtgtgaagataaaaacataacgcttcaggcagttgatatcgcaaaagtatatccggatgtggatgcaatctgtgagtccattaaagaaaagtatgagtatagtgatcagaagtatgtacttcttattccaaatcggattgaggatattatacaggagggcagggcacttaggcattgtatacgattcagcgatgactattatgaacggatacagagaagggaaagctatattgcatttttgaggaaagcagatcagccagagaagtcattctatacattggaatttgaaccggacgggactgtccgtcaaaagcgtacaagcggtgaccgacaaaatgtagatttcaatcaggctgtcagctttataaaaaaatggcagaaggcaatccagccacgattaacagaggaggattaccggctggccaaagtaagcgcaagtctccgtgtagaagaatttaaagaactgcggaagaaaaatgcgaaagtatggcatggtcatcttgcgggcatgcctttagctgatgttctggaagctgatttgatggaagtttctttgtgtatggaggatgcaggggtaacggaagcagacggtcagaatagcgaacttgtggccgcataaaatcaaggagggatacgacaaatgaaacagaagctttactatattaagaatgaaacagcggaaaaagcgatttataagaattttgagaatcagaggttttcagtgatagaaaaagacagcgaacctccaatggtactatcgtttttcgatgataaaaatatgactgatgaatatgagtatgtttatattccacgcgagatgtctaaaaaagaggttgaaggtcgttttgaagtggagaagcaatgccctatgtgtggaaccgttacaagtatttatcttacagatgaggacatgaataaatacagctggtacagcaactcgcgttttaatcgtaggggaagcggcctgccggctccgcatatccaaaacttatttccggaccggacagaagaagaacgggaattaatgatgtcagggtactgctattggtgccaggaattgatttttggagaggatgagtttcttctaatgacagaagcagaattttcgatggagccagaccacctcattgcatataaccgtgcagaccatgatggatatcggtggtggaataagtggtttccacaaaagggtacggatggaaaccagtacatggtgcaggaaatgaataaattctctgcgtatattttggaggaacagcttggcaagggcatttccgacattccgaaacttggagcgtattatggagcagagccatctgaagacaaggaatatcacttgtactgcgagggaacatattgtaattttcatgtgaagtttataaataggaagagaagctacaatgtgtacatatatgtttacgaaacagaagagtaaataaaaaatgggcaggaagccgccgggacatatgatatctggaggcttccgtaccatttcttataagaagaggatatgggatgagagactatattaacagaaatatcaggatagatggaagattgattccctatccggtgtatacatcttgggaatattttgagttgcatgatgggattgaagatgtggaagattttgtagattcaaatcctgcgatagaagaattagtgactcagattttagcgttaaaacagagttgttttcttttgcgtcatacaacacatagctgccaaagcttaagtgacagtttgttttccctaaaacttaaacttattaaagagctcaaagagaaatataattataattttgatgatgtatggatggaaaatctcataggcaggatttgataccataatgacattgttccgtagttattatacaaatatgaaaaaagatagttgcccatagtggcatgaaatggaggcttatatgaaatatgaagaatttattgcggcgctttgccagaaaatacgcgaagtaacaaaaggatggaatagaacgagtatagaatttaggacaacaccacagaacaatgggagaaccttggatttactggtggtgagcaagcaaggaaaaaaaatgaatggaacttacgaattgagtttccatacacaggaattatatgaagcacttgcatttgacaaaatggatttgaaacatattttgagaatagtggaaagtaaactgagacaggctggggaagttggaaaaatcagcccgctggaagtcgctgatgattatgagcagatacgaagtcacctgattattcgaccgattaattatgtaaaacatatggaaaagttaaaagacggtatgtacgatttaattggtgacattgctttgactgtctatattcatattggctttgttcatggagcctatgtaagcagtgctgtgagttccgagtacctggagatatggaataaaggaaaagaagaggtaataaaagaggcatttacgaatacatataatttattcccgccaattatgttgacaggtcttgaggcatattctgttatggataccgatatatttcaaaaggatgctggatatgatatggttggggttacaaatgaagtcatattcaatggagcagtttcgattttccttcctggagtagcaaaaaaattaagtgatatcttaggggaagatttatatattgtattccttaactatgattatgcagttattcatcctgtcagcattatacggccagaggagattcgcagtttaatagctagcgtcaattctgatagtccggatgaagaaggatttttgtcggatatgatattcacatacagacgcgattctgataaaatggaagtagtgaaagaagtttatagttaggtaaagtacagtttacaagggactacacttgtacgtctgaaataacggcatttaccagctgtgaagaatggacaactctggagatgcagatcatgtaaaggttcttgacaatggcataataaaacaactgaaaacacaggagccaacctacaacaaaacgccgtcattggagacaatgggcggtgtttttgcgtacatgggaaaattgcggtggacacgatatgggcaaggtaggatcgtcctgtcgatggcatcaccccgttcacttctgaacaaaatgtccagaggttgacgctctcccgtcaacatggctcctgtgggtatatatcccccgtcgccgccccctttttcatgattggaaaagggggcggcgacgggggataaggttgaactcgcaaattaaaacgccggagcgtttggaaacgaaacacacacgaaacagagggctggcctgttaccttttagccctaaaaaagccgcttgtatcaaggctttgcaggcccagtttggaggggggctggtatctttctatggcctgcccctgttttgaacttcaaagcgtaacatttaacatgcggcggagaaaaaagacctctatgccgagtaccacacggcccagcgggatatgcgggaggtcttggctgtcaagacgatcatcgaccatctgcttgggattacggcccccggcagggataaggaacaggcgcgatatcgccggggacgctaccatcacttctggacattttgtccagaagtggcgggtttggggagcaaccccaacaagcatttttgcggccccggcggggccgcaaaaatcgcaagcgtataacacttgccctgcttgccattagcgtacaatccaatatttctacttgtatgctggctttttagaccccaaaccaccaaaaaattgataattgacatgtgcggatgtccatgatattataaatataccgcgttcggtttaattaaaggagagatattatgtcacgcacccagaaagactttgcgccacgtaaagagaaactgattcaaattgctttggatcagtttctcgaaaagggttatgaaaatacaaccatcaccgacttgcaaaaagcgtttgggctcactaagggcggtatgtatcattacttctctggcaaagaagaaatacttgataccgtgattgaaaaggggctcggtgatttaattgatgaatggcgcaatcagattaaggagttaccagataaagacagattgatgtttgtgttatttacaaacacagcgaacagtttttcaagccgtctaattcaatatggcaagtcgggagaaagctcaatcgtaacctacaaactgcgggaacagcgtttgaagagactggttcccctggtaacagaaattatcaaacagtgcatggacagtgggttttacacctgtgagtatcctgaagaaatagctgaaatcgctttgttattggctatctccatcggcgatcaattatttggcctacccagagatttggatcagaggaagagacgcatcgacaccataatagccttgtggagaaattgtgtgcaccctcctgaaagccatttagatgagttgcgagacaatttgacccgtttttatgaggatagtatgacaagaagtaactcgtaatattatgactcacataaggagaatgtcacatggcaccaaaagcaaaactttggaacaaggattttactctggtcgtaataggccaaattatctcactgttcggtaacgctgttcttcgctttgctctgccgctctatatcttggagcgaagcggctcacccgccctgtttgggcaagtttccgcactggcttttttacctatgattctgctttcgccagtgggaggcatgatcgcagaccgtgtgaataaacaacgtatcatggttgtcttagattttattacctccgctttggtttttggctatattgccataagtggttatttttcagccatagccattgtagtcgtgctgatgatggcactctatgccattcaaggggcgtatagcccggcggtgcaagccagcatcccattgctggtggaagaggaaaagttggttccagcaaacgccgccgtaaaccttgtaaactcactgtctaatatgctggggccggtcataggcggcgtactttatggaacgtttggacttcccatagtgcttattgtaagcgccatatgtttttttctatctgcggtcatggaattatttattagaataccgcacaaaaagcaagagtccaccggaaatatgtgggctacagtgaaaaaggatatgggcagcagccttcactttatgttcaaaacaaaaccgattttagcaaaaattatctttatcatgacattgtttgaactgtttgacagttcagtacttattatcggtttaccagtgttaattacacaaacatatgcgctttccagccaatggctaggtgtgacgcaaggcgttatgatgggtgggggattgataggcggagtgctggctggagtgctggcaaaaaaattatccattaaaaaaatacaccgattgctgttactgatagctttgtgttttgtaccgattgtgttaggactactgttaggcgtttctgctataattggctacagcatcattacatcggcttgcttttttgctatgatcgccggtgtactaatgcgcgtgcagttgtttgcgttcatccaacaggtggttccggaagaaataatgggtaaggtattttcctgtttgatggcaataaatctttgtgctcagcccattggtcaatggcttgctggctggggcttcgagcgttttgcagagttgccgtgggtcgtgttattggcggctgtcgcgctatccagtatagtatccatctgttcccgcagttgtttccacaaaatagaagtatagtttatcccatcccaacgaaagtctcagctggcgtaaccagatgcacaaaaagattaaataaaaaagctgtctatcacctctggacattttgtccagaggtgatagagaacaacaatcggaaaggagggctaccctatgaacgcggagcagagagtgttgattattgatagtgacttgaaaaactgcaaggccatcaagtatgctttgaccgaatacggcatcggtgcttattatactctgtctgtgatagacggcatcgagcgccttactcgccataactacgagcttgtgattctggacatctccctgtcagaaacgggtgggctccaactgctccggttcatgcggcacatgaggaatatgccgatcctggtgctgtcttttcagggcggcattgagcaccgggcgcgggcttatgaaatgggcgcggatgatttcatacaaaagcctctggagctccaggagtgtctgcttcgtgcccaggccctgctccggcgctataacgcaaccgccccgcccctgcccggccagcggtgctataccattgtcacgtttgaaaacctgataatcaatccccttacccgctgtgtgatttacaatgggcgggaattggacttaccccgccgggagtttgatctgctgtatgtgctgtcctctcaggccgggagagtacttacccatgaacaactgcgctactatgtttggggcgatgatttttccggcaacgaaaccaacgccatttccgtcagcgtgagccgcctacgacaaaaactggacggcggggagtgcattgaaaacgtccgaggcgtgggctatcgctttacagcccccgcgcataaaaagaaatagaaatcatctatttacggtattgttacagtaccaacacttctggacattttgtccagaggttcccaggttgaaagtttacacagtaattacttattagggggttcgcttttagctctaaagtgcggttgatagatagagggacattttttctctcctgacgcagagcgggcggcttctggacaaaatgtccagaggtattgaaagtcaatttgaattttgccggtacgaattaaaaggcggtgagggcaaggaatataaagacaagggatattcgggcaagcgggacgggattattgattatcataaaaacacgtttagactgatttgagatgcatagaagcaaaggttcttgtaagcactttgtaggaagttatgtgattgaggaagatgaattgttgcagacaatggaggagtggttttctaaaaagcgctgataccaatcaagttttcctgcggtcgccacttgcaaagcaaaaactggaatgctataatagcgctaacagaataaacaggggagcttgtgtgacaggctgagaggaaggtagaccttcgacccttgaacctgatgcggataatgccgccggaggaagtcgtggagattggtactttttcagggggcatcctatgcaggtgtctcctgttttttgcgctttttgaaggaaaggatgtgagaacagcaaccgcggtatgcctgcggcgggttgagggggagcgccctgaaccttgtatgacagcgatgggaagccgtgttccggcgtgagaggaggccagtaagcctcgaccgaatctttccaaccagcagactctagcggtctgtcatcattaggggaaggcgccgctatacagggccgttttctctcattacaaaggagtattatactatgtttgaacagatttttgaaagtgtccggcagaaatccccgctggttcactgtatcaccaactatgtcactgtcaacgattgcacaaacatgctgctggcttgcggcggctcacctattatggcggatgatccgggggacgctgtggaaattaccagtatctgcggcggactgaccatcaacatcggcacgctgaatcagcgcaccattccggccatgcttgccgccgggaagcgtgccaacgagctggggcatcccgtagtactggacccggtgggagccggggcttccacgctacggacggacacggccctccggctgctaaaggaagtgaagttcgcggtaattaggggcaacatctcggaaatcaagactcttgcctccggcagcggcaccaccaagggcgtggatgctgatgtggcggatcgggtgactgaagacaatctggatggggcagtatccttcgtcaaggagcttgcaaggcgcattggggcggtgattgccgttaccggagcgattgcattgtggcggatgaggagcgggccttttgtatacgcacggccgtccggagatgtcctccatcaccggaaccggctgccaactctctgctctgactgcggcctttgtcacagcaaaccaggatcagtccctggaggccgctgtggccgccgtgtgcgccatgggtctgtgcggagagattgcctacaagcgtatgacagagctggacggtaacgcctcttaccggaactatattatcgacgccatgtaccgcctgaccctggcggaactggagaaaggagcaaactatgaagtgcgataagcggcatatgctgctctatgccgtcaccgaccggacctggaccggggagcagcctctttatgagcaggtagaagcggcattgaaaggcggcgtaacctgtgtgcagctgcgagagaaagagttggacgaagcgacgtttcttcaggaggctaaggacatctgcgccttgtgccgccggtatggagtgcccttcattgtaaatgataatgtggacatcgcaattgcatgcggggcggacggaatccatgtgggccaggaggatatggtggcgggggaggtccgccgccgggtgggggacgcgatgattctcggtgtctctgtccacacggttgaggaggcccgtcaggctgtccacgacggcgcggactacctgggtttgggagcggtgtttcccacaagcaccaagtctgacgcagaccagatgaccagcgagaccctgcgggatatttgcagcgcggtggatgtgcccatcgtagccatcggcggcatcaaccgggacaaccttcttagcctgaccggcagcggcgtggacggggtggccctggtatccgccattttctcggcagaggatattgagaggaattgtcaggagcttcgggcgctggcagagaggatggtaagggcatgaggatttgcggcgcaatttttgatgttgacggtacgctgttggattccatgtttatttgggatacgattggcgaaacctatttgcgctccatcggatatgagccgagggaggatctgaacgatacgtttaaaaatatgagcctgcaccaagcggcctgctattaccagacagagtatggtgtgacgctgagtattaaggagattatggatggggtcaacgccatgctggagcggtattaccgttttgaggttccgctgaaggcgggagtaaaggagctgctggcacagctccagcggagcaaagtcaagctgtgtatcgccactgccacagaccggtatctagtggaggatgccctggagcggtgtggggtgctgtcctgttttggggagatttttacctgcaacgaggtgggtcacggcaaggacgaaccggaaatttttgaagcagcgcttcgcttcctgggaacaaagatggcagagacagttgtgtttgacgatgcgctctatgccgtcaaagcggcgaaagcggccgggtttccggtagcggcggtgtatgacagccatgaaaagaatcaggaggaaatctgtactctgtccgatctatacctgaaagatttgacgcaattggataaacttaggaacttccttccggtttagcggctgggagttttaagcggcaaattgggggcaccaccttttgccgctctataaaaataatgcaaaggagatatagcaatgagaacagcattatcaatcgctgggacagaccccagcggaggcgccgggattcaggccgatctgaaagcgatgaccatgaacggtgttttcgccatgagcgctattacggcgctggtagcgcagaacaccaccggcgtaagagaaattgtagaaatgacacccgattttctcgggcagcagattgacgcggtattcgaggacattccgcctgacgcggtgaaaatcggtatggtagcctcctgcggactgattgagaaaatcgcagagcggctgcgcttctaccaggcaaggaacgtcgtggtggacccggtgatggtggcgaccagcggcgaccggctgatttctgaagaggcggtggacaatctgaaaacctgtctgctccctttggcggccgtgaccacgcccaacatcccggaggcggagatcctctccggcatggttatccacagaccggaggacattgaagccgctgcaaaacagatcagcaacgcttacggctgtgcagtcctgcttaaaggcgggcacaacatcaatgacgccaacgacttcctctatgcgggcggcgtggggacatggtttcatggaacgcgcatcaataacccaaacacgcacggaaccggctgcacgctttccagcgccattgcggccaatctggctaagggctttgacctgcccgcatctatccggcggtcgaaagagtacctttccggcgcactgggggccatgctgaatttggggaagggccggggacctatgcagcacaatttcaatctgacaggtgaatacgcaaaggaggcagagtaatgaagataacagagcggcttttgtccgcaacaaaggatatttgggcgtcttataatgcgcatccttttgtgagggggatccaggacggcacgttagaccgggagaaattcaagtattacatcatacaggactatctctatctggaggagtatgctaaagtgtttgcgttgggcatcgccaaggccaaaagccctgaggtaatccagctgttttctaaatatgtgaccttactgacagaaggggagatggacattcaccgtggctatatgggcagattctcggtttcctgggaagaacttaaggccacaccccgggcgctggataatctctcctatacctcctatatgctcagggtggcatatgaagagggagaggccgaaattctggctgctatcctgtcttgtgcctacagctatgaggtaatcgccaaaaaaatcgtagagaaccgttcggcggcgctggagcatcctttctatggagattgggtcaagggttatgctgatccccactacagtgagacgaatgtattgctgctggaaacaacagaccggctgacctgtagctacaccgaggaccagatcaagcacctcacagatatcttcgtagcctgctcccgttacgagctggccttttgggaaatggcctggaacatgagcaaatagaggggattcaaggaattgttattataggtttttgctttttcatacacggaatcttgtagatgttctataaatgtgcttaaactgaacgcaacaacaaatcgaaatttgcgaggatatgaaaacggagtatagaaaactatacgtggatgaagcggaacaattttggagtttgatgaatcaattggattatgaaacaaagtatatgctatacgaaccgggcgaaaggacaaagaatcttcctagaattgagtctttaatacgagattccgtggaagggcaaggcttccttctcattgccgaaacagataataagcttataggatacatatcagcacaaaaaggcagattgaatcgtattgctctttctgcatgggaatcggaatgtcagttatcatgattttgattttggttattcaatatgcaaaaagtaagagatttctttgccagttaagatttgtttatgaatactaggggagataacgatacagcgcctcgttggcgtttagataagcagataggagcaaagatattttagggaggaggaccaatatgaagattgtaccgaccttgaacttcggcggtaactgccgagaggcaatccaaatgtatgaaaaggcatttaggggacagataacctgcctgattacctatggcgaggctgacgatccgcaatacaatccactgctcagggatgatcagaaaaattatatttatcatgcggaacttctgatcggtgaacagaaaattatcatgagtgaccatgtggacattgagttccagatctgttactcgaattttcttaccatgatgtatgatgtgaaagaggaggttcagcgggcatacgagattatgagagaagggagcaagaccatttatactatggagactactccatacagttcctgcagagtgttttttgttgacagattcggcatccgctgggggattatgacggagcagacggagaggtgaggcgttgaattgaaatggtaagatatattgcatttttgcgtggcattaatataagcggaaaaaataaagtcccgatggcagaattaaagaaaggctttgaagaaatagggtttgcggaagtaaaaacttatctgaacagtgggaatgtgattttttcaagtgacgaagatgatatggtggaaattacaaaccggattgaaacgatgacaaaaaggcagtttggccttgagatccccgtttttgtcatatcaaaagagacacttgaggatattttaactcatgcaccggattggtgggggagcgaagataaggaaatctatgataatctgattttcattatccctcccgccacatttgctgatgctttcaacgagattggggaaccgaaagaagaattggaaaagataaaagactacaaagaggcagtattttggtcttttagccggaaggattaccaaaaaacaaattggtggcccaagaccgcaagtgcaaagatcagtacgaaattgacgataaggacagcaaatactgttcggaagatagttggaatgtgattagtcatcctgcaggatgtgataaagctgattcgctgagagtttatcaaggaagcggagcgagaactttcagcttgtagagtcttacgaaagagagcaagttaagatttatgtttcaatctattttaagttatggaggtaggcgttcaatgaaaatcgaaaaatgcaaaaaagaatcctttgttgtaatcggaaaagagggagcaacaacagacggagctgatttcattcaaaagctatggaacgatgcgaattcccattttggagaagttcagcatttggcaaagaaagatgaagacggaaatatcagtggaatatggggcgcgatgtctgatttctcccgttccttccagccttgggaagactttagtaaagggctttatcttgcaggagtagaatgtaatgctgaggccgaggctccagacggctggacaaaatgggtgattcccggctatgagtatatttatgtggaacgtgaaaacgatggtatttttccagaagtaatacaatatctgaaagataatcatattgctttggttggggcggttcatgattttatatgctctcagaccgggaagggatatgtgtttttcccgataagggagttgtaaaaagaagaatttacggaggaaaacaaaaatgaaatctatctgcggaatcgactgtacgaactgtgaattaagcggcgcttgtaacggatgtgcggcaacaggaggctatccctttggagcagaatgccttgttgcacaatgctgcaaaagaggggagaaggcgttagacgaattgaaagagaagctgattgcggcctttcatgctcttcacattccggatatggaggaagtgacagagctgaatgcactgaaaggctcctttgccaatattgaatacgtccttccgaatggtcagatcgtaaagttctgggatgataataagatttacctggggaatcagctacataagaaaggcagtgataggtgttatggaatcattgctgacgagaagtacctcatggtatccgagtatagcggctatggagctgatgcggaaattattgtgttcaaacaatggaatgtggcggggaacgaatagatattttcgaggaaaaagtatgataggcatatatttaagtggaacaggaaataccaagcactgtattgaaaaattgatggggttattggatgaatcggcacgagctatcccgattgagggaaaagaaacagcaaatttattggcacaacatgattttattgttttggcatatcctgtgcaattttcaaatgcacctgtcatggtaagaaattttatcaaagaccattcagacctttggaaagggaagatggtgctttgcgttgctacaatgggattatttagcggagacggagcgggctgttccgcacgattattgaaaaaatatggtgcaaaagtcgttggcggcttacacattcatatgcccgattccgtttgtgatgtgaagttgctaaagaagtctattgaaaaaaatcgggagattattaaagcagcggacaaaaaaattgaaaattgtgcgggcaaaatgaagcaaggtaaatacccaaaagacggtttgtatttttacgataggatagctggactactctgccagcggttatggtgttatggaaaaacaaaagactattccgataagctgaaaatcagcaacgcatgtacggggtgtggtctatgcgtccgtatatgtcctatggaaaatctcgtcataaaaaacagcaaggcgactgccggaagtcgttgtactatgtgctaccgttgcattagttcctgtccccaacaggcaattacactattaggaaatacagtagttgaacaatgccgctatgaaagatatgtggaaaggtagatatcttctattcttataaaaatcaggatcggtagggaagttgcagagaacgaaaaatcggaattgatggaggaattgacaatgaacaggtatgaagaaggaatgaaattaatcgaagaaagttgtggcaacaagaaagataatgccattgcactctcaacgattgctacggaaccgagtgcagatggttttcctcgccctagtgtccgtgatgtaagcgcttattatgaagatggagtgttttatgtcacaacgtcagcaaaatcaaacaaaatgcggcagatagctcataacaaagaggttgcgttttcagtttgcttttaggggatatacggacatggaattggagaaaacctcggatgggttttggaaccccaaaacgctgctctaagaacgaaactccgtgaagtatttgcagactggtacgacgatgcaaataatgagcaggatgaaaactgcgttattttggcaatccgtatcacaagtgcaacgatatttagagatcacggtgctttgcgttataatttggactttgcaaataaggtagcggttgaataactgtcaattaagtaaggcgttaagcgctatctaatgagcactctattgggagaaggcgcacttacaattcaagtttgtcgaaacgcaaaacgggaggcacgctctccttttacaatgcgccggtgtgaagttgctaaagaaatcccttgaaaaaaatcggaagaagtagcagacagaaaaatgaaaattgtgcgggcaaaatgaagcaaggcaaatacccgaaagacggtttgtatttttacgataggatagctggactactctgccagcggttatggtgttatggaaaaacaaaaagactattccgataagctgaaaatcagcaacgcatgtacggggtgtggtctatgcgtccgtatatgtcctatggaaaatctcgtcataaaaaacagcaaggcgactgccggaagtcgttgtactatgtgctaccgttgcattagttcctaaattggaatatgaggaggtaatggaatgaaagttttacttttgtgtttaaacgcttttgaaatgatggaatttagtccctttgtagatgttatgggatgggcaaatgatgattttaattgtgatattaaggttgaaatatgtggatttcatcaaaaaattgtaagtacatttggaataactatagaatccaatgttttaatagatgatgtagatgttaatcagtatgatgcattggctatccctggaggatttgaagaatatggattttataaggaagcgtatcatgaaaaaacattaaatttgattcgctcttttcattcactccaaaaacctattgcgtcagtttgtgttgctgcttttccattagttcaaagtgaaatactaaaaaacagaagagcaactacctatcatttgcgtgggggatacaagagaaaggaattagaagctttaggagttgtgcttggagatgaatggctggttgtcgatgaaaatatcataacatcttcatgtccaaagacagcaccagatgttgcatctcaattattagaaatgcttacaacaaaagaaaaagccattgaagttaaaaatgcaatggggtattaacaaactttcatttatggaggaggttatcatgcttgatataatacctagtgctgaagaactatttcagttgagaagtaagtcaatctatatctgagttataaattaaatacaccttgcccttatgaaagaaggctatcgattcacaaagcaaattccttttgatgatgagggtgggatttctggcgtatttgggcctgaagcagatgagccgcccgtatcggcctatggtgccactattatcactttgccaaacggttcaagggttgatttaggacattttgatacaacggatgaagcaaaacatgccgttgaagaatatctgtcacagcaagttgaggctggtacgcttacacaatcggaagctgacaatattctcatacatggtgcagttggataagtactaatggagtgttagtaaaataggggagggagagattatggaagcgtataaggacatgaagagtattaaccaaagaccatttagtatattagcagattgcgataaaatatatcaatttttgcttgaaatatatgagagggattggagaaacggcgtaccagctcccttctttgaatacgcatacgtatccttttcctactggatggacatatcctattcttacaaaaaccgaatttgggaatgtgatggagagattgttgcattttgtttttatgaaaatccagtaacagatatctatttctgtctgaaacctggatatgaaaatctggccttagaaatggtggcatatgctgatgaaaaaatgctgatgaacggaaaaagcatacaatttattttctttggcgggcaagatgcattgatggatgctgcgcggcagttgggatatggacagaaatcagaacactgggaaatgcaatatgattttgcatatgcattggattatccactgccagaaggttttcagtttataaagccacaggatatggatatatcaaaagtaggaaaatgctgctggaaagggtttgaccatgagcaaagtgaaggccaatggaaccatcagtatgagcaacataactatttgctgagcaccgcgccgcacgcaacgccggagctggatgtggctattgcggatgagtccggggaatatgtctgctatgcaggaatgtggtggactcctgaaaatcatctggcatatatggaaccgctctgcaccattcccgaatatcgacataaaggtctcgccgcagcgtcattgtctgaaatgtatcggagaacaaaggcgttaggcgcaacgcatatgacaggcggtgcaaacaggttttatcagaaacttggataccagaatgcagtaaaatggaccttttggcaaaaacaataaaagtatgggggcagcctttatatggaagccggattcccctgccgcaacagctattatcataggatattgtatttttgctgcggtcagctttatatatgccatttttctttttgtaaaaatgaaacttagggatattaacaccaaaattgcgcttatctactttcatttttaggatttgggctaaacggagtatgggttgccgtacttatcagccatatttgtgcggtagtagcttccactattgtatcgatattacagtttaaaacaccaaaataattcaaacatattttaccgtcgtgtttcttttgtatcgacataatgttacattcttttcgtcaaaaaaagcccgccccccggtacaggatattccggcttcatggatgattacacacatcactataatactgtttatatttcacttgcgcccgattgcattttgcagtcgggcgcattttgtattttctcaaaagtttttctgcaaaatttctaaataattccattccaatcctatttatattatataaggtttattttttgtacattgaaaatagcataggttcagttgtcctataacaaaaactgaaatcgagcatacgagagatacgccatagcagaaatgctgcgaaatatatcaaatcaaaataagcccgggcaggggtttgatggcttgtgacggccgcataagctgtgcgaggatgatatcagttggaaacttgtggggactgccgctcacctaatgaggggaggctgcgttagtatggaaacatctggcgtggtttaagctgttttgcaaacagataggacaactccagatgccgggggacgagtaaatacggcatgaaaatttgctttggagaaagcacaaccaccttaatgaaatgttataagaagtaaaaaaattgtgaaatgctcttgaggaaacaaaagccaattttttacaatgattgtagagaaacagactgttttaaaaactgagcggttttgtgaaatcaatatagtattagcgattagtctaagattgaaccacgttaggtggcatcaatcatgctcatggctagttgcctttgtaaagggggtgacagcgatagaagttttacagaaagataaaaaagtatataacgcagaggaaatccaggagattttagggattgggaggagcaaaacatatacctttttggacgaggcgtataggaatcaaaagccgttccgggtccttaaagttggaaagcttttcagggttcccaaacaatcttttgatgactggctagacggaattagttaaggcgggtgagatagttgaaaagaaaaccacagaatagtgcagctttttttgaaaataattcatggtatcaccgtaccaagatacttcaggacgatggttcgataaagtacagcaaaaagggcgggtttgctaccagtgaagaggctgataagagctataggcgacacgaagatgagtttaaaaaggcgtatcgggcctatcatctggcacatcaaatcaatacagaagtcacgcttaaggattatttgatttattggtttgaggagatattctctcaaagaattgaaacaacaaccagaatggtaggcgcatatgcggtttatgacttaatcctgccgaatattgagtacgacatcaaggtccggtttgccaatgcagagtatcttgatgcattgttggagcgggtagcaaaggtcagtgcctctgcaggaaataaagggcgggagattctaaatatggcaatgaaagaggcagtaatcggtgggtatattaaaaccaatccggttactggcacaaagccgtataagagacaaaagccaaagataacaattctgagtaaagaaaaaatcaaggtcctgctgaaagcgtcttccgaaaataactggtatttggaaatattgttagggctattctgtggcttacgaaaaggcgagattcttggacttaaattcagtgatttggatatggagaaaaggactgtaactatcagaaggcagattgcttcagatccacttataaaaaaagggagtggaagtaaaatagacaattatgggctgattgaacgagatccaaaaacaccaaacagtttccgggttttgcgggttccagccataatcatagaagaactggaaaaacggagacgacttgtggagtccaataaggtagtgtatgccggtcaatatgatgacaatgattatatcagctgtcagagaaatggaaaactacatagtttgtcagctttaaatagcgctttaactggaatttgtagcaagaatggccttccgcatatcacggtacatggattaaggcatatgtatgcaacaattctgattgagatgggggttccactgattaagatatctgcattacttgggcacggctctgtccacacaacgtttgaatattattgtgatgtaatggatgaaaacgagaatatattggcatttatgaatcaagcattcgttcctgtggaaaggagagcagtatgataattgatttgagccttcagcagtatgtggattgggaagtaaagccagtgattcctataaagggaaaattcggataccgtgttgttttaaaatacatagatggtactgaaagaactcagcaaaagtcgggatttaagacagataaagaggctaatgctgccagggataacacaataggtaaattacatgctggaacttatattgtatatgagaatgttaaagtaagtgactttttagagttttggctaaaggaggatatatgcaagagggtaagaagcgaagaaacttatgctgcttattccaatatcgtgtataaccacattattccaatccttggaaagaaaaagatgtcagccgttaaccgtggagatgttcaaaagctgtataacgaccgtgcagaatattctgtatcggtctcaaggctggttaaaacggtgatgaatgtctctatgaactatgctgtagcgaaaaaaatcattgcggagaatccggcagttggtatcaatcttcctaaaacggtaaagaaaaaggaataccatgcccgcagtattgacacacagaaaaccctgacaatggatcagattctgattctattggaggccagcagggacacgccgatacatatgcagatcctgtttaatgtattaatgggacttcgcagaagggaaatcaacggtgtgaaatattcggatattgactatattaaccgaacactaaagcttcgccggcagttggggaagaaaatcaacacaaaaaaagaagactttccacctaaaacctttacgaaacaggaacttggattgaagaccccatcgagctatcgtgatattccgataccagattatgtgtttgaggcgattctgcaacagagggaggtgtatgagagaaataagagtcgcaggagaagccagtttcaggattcaggatatgtttgctgctctaactacgggaaaccgcgaagcaaggatttccattggaaatattataaaaaactattagcggataacaacctgccggatataaagtggcatcatttacgcagtaccttctgcacactgcttttgaaaaataattttaatcccaaagcggtatccaaattaatgggacatgcaacggagctaatcactttagatgtatatggtgataaccgggaaattattgctgactgtgtagatgaaattcagccgttcatagatgaggtgcttccgataaaggaggtagacaagcagcttgaggaagaactgttggaaatcgaagttccggcagaagattatgtttaaaaattaagggcagtagtagtttcaatcaaatatcaatttggttctcaaaatgaaacaaggcgcaggggaaagaacaaatgttcctacttgcgcctatactttttccttccgctatgttataattttggtgacatttggtattactaatttcatcgagtttatatagtgttgcggagttaagaaaatagcattttggtgaccttcattcgtaaaatggcaaaagttcgtctattaggcaactcaaaacggtcttcttttacgaatttctgcctaataggcgaattttttaagtggtcaccaaggaaggaaaaagcgaaaatggagttcaaattacagtcagaataccagcccaccggcgaccagccgcaggcgattgaagcccttgtaaaaggcttccaggaaggcaaccaattccagactttactaggggttacgggctctggaaagaccttcaccatggcaaatgtcatccagcgaatccagaagccgaccctcatcattgcccacaacaaaacccttgccgcacagctctacagcgagtttaaggaatatttcccggagaatgcggtcgagtattttgtgagctattacgactactaccaacccgaagcctacgttccgtccacggacacctacattgaaaaggattcttccattaatgatgagatagacaagctgcgccattccgccaccgccgccctgtcagaacgggaggatgtgattatcgtggcttccgtatcctgtatctacggcctgggcagccctattgattataaggagatggtcatttcgctgagacccggtatgattaaggaccgggatgaggtcattcataagctcattgacatccagtatgacaggaacgatatggactttaagcggggaactttccgggtgaggggggatgttctggatatatatccggcatactccgatggggtggcctaccgggtggaattttttggggatgaggtggaccggatatcagaaattgatacgctgaccgatgaaaccaaagcccagctgggccatgtggctattttcccggcatcccattatgtggtgccgaaggagaagatgatggaagccacagagaacattctgacagagctggaggagcgtgtcacgttttttaagagtgaggataagcttctggaggcccagcgcatatcggaacggacaaactttgatgtggagatgatgcgtgagaccggattttgttcgggcattgagaattattcccgacatctgacaggaggcctgcccggggaaccaccctgtacactcattgattatttcccggaagattttctgattattgtggatgaatcccacataacccttccacaggtgcgcggaatgtatgccggcgaccggtccagaaagaccacgctggtggactttggattccgcctcccatctgctctggataacaggcctctggcatttcctgagtttgagtctaaaatcaatcagatgatgtttgtttctgcgactccctctgcctacgaggcagaacatgagcttatgagggtggaacaaatcatacgtcccaccggacttctggatccggagatatcggtgcggcctgtggagggccagattgatgacctggtttctgaagtgaacaaggaggtggcggcccatcacaaagtacttatcaccactctgaccaaacggatggcagaggacctcaccgactacatgagagaggtaggtatccgggttaagtatcttcattcggatattgatacgttggagcgggctgaaatcatccgggatatgcgaatggatgtgttcgatgtcctggtgggcatcaatctgctgcgggaaggactggatattcctgaaattacactggtggctatcctggacgcggataaagagggattcctgcgttcagagacatccctgattcagaccattggccgtgcagcccgcaacagcgaaggtcatgtcattatgtatgcggacaaggtgacggactccatggctgtggcaattgaggagaccaaccgaagacgccagatacagcagaagtacaacgaggatcatggaatcacacccaccaccatcaaaaaggctgtcagggatttgattgccatatccaaggcagtgaatgcagatgacaagcactttaagaaggatcccgagtccatggacgagaaggaattaaagaagctgtcaaaggaactggaaaagaagatgcaccaggctgctgcggagctgaatttcgaggaagcggcaaggctgcgtgacagaatgatagaaattaagaaaatgctgcaagacatgtaattttctgtaactcatggaacattgtacctaaaaatgtaatattctcttaaggattattaaattgtacaatagatgtcactactttataataaagataggcaataaataacaattgattgcaaatatagacgaggaggataagttttatgaggagaaaaagagggctatgtctgctgctggcagcatctatggcattgggcagtagtttcactgcattggcagcggataaaaagattgacacggtgaagctgagtttttcctattcaaaggcgccggagagcggggacgaaataggagacattacggttaaggccggcagcagcggatttgaagtggactctgccgagtataccaatatagaggaccaggatacctggacggttggagatataccggaggtaaaggtggaactgtcagccaaggacggatacaagttctcctatacatccaaaagccacttctctctttccggatgtaatgcggatttcaaaaaagcaaagatttatgacgatggccagtacattgaagtgtatgctgagttaaaacgtatcggcggcaagcttcagggtgcgtcggagctggaatggaatgataccacggctgagtgggaggagattgaaggcgctaagagctatgatgtaaagctgctccgcgacgacaagacagtcactacggtcagcactacaggaacctcatataattttgcaggttattttaaccgggagggagactataccttccgtgtaagggctatttcccgttacaataataagacaggtgaatggtccgaggattccaactccctgtatattgatgaggatgagcttggccgctatggcggaagcggacattgggagcaggatggtactggtgtatggtatgcgtatgataccggcggatatccggcctcctgttggaaacagattaacggcgcatggtattatttcaataacaaggggtatattgttaccggctggcagaagctggatgggacctggtactatctgaacccttccaacggtatcatgatgaccggctggcaggctatcaacggcaaatggtattatatgaacggcagcggtgagatgcagaccggctggcaggccattaatggcagatggtattatctggacggcagcggcgccatgcagaccggctggcagaggctgggcggacagtggtattacttagaccccagcggcgccatgcagaccggctggcaggctattaatggcaagtattactatctgggcaccaatggagccatgtattataatacatggacgccggacggaaaatatgtggatggttcaggagcctgggtgcagtaaatcttaatacgaatatacagaacggaatcataaagaaatatagagaaaaagcaggaaaagatgcagcggagagattcgctgtatctttttttgaattgagtttgtcataacaaactctttttattgacattttttcgcattaagcatacaatgaatatggtttaaatgtaactacaaaaggagacaggcatcaatgcagaaaaagctgaatgagtgtgagatcggcggccggtatgttgtatcgggcgtgcaggtggatgagagcattaccagacgtcttgaggccctgggggtcaatgaggggacgcctgtaaatatattgaataagaaaggcagcggaagcgttatcatcaaggtgcgcgggacgcgtctggccttgggaaagcgcttgtccgaaggtattacggtcagggaggaacaggcatcatgaacggacgcgcaagagcagatgggacggatacgtacggcagtgtgattctgggagacagcggggcgaagaagatggatttccaagatcagcatgaggatgacaggacgccgatcacagttggatttgtaggcaatcccaactgcggcaagaccacgttgtttaacgcctttaccggcgctaaacttaaggtggctaactggcccggtgttacggtggagcgggtggaaggcgaaaccagctataaagggcgtcccatcaaggttatcgacctgccgggcatctacagccttacctcctataccatagaggaaaaggtcacccgcaaatgtattgaggacggcggtgtggatgtcatcatcaatgtggtggatgcgtcttccctggagagaaacctgtatcttaccatgcagctcattgagcttaagaagccggtaatcctggcactgaatatgatggatattgtggaagagcggggcatggaaattgatatgcaccgtctcccggagctgctgggtgagataccggttgtccctgtatcagccaggaaacggacaggactggatgtgctgatgcacgcagtggtccaccactatgaggagggacctcagggggtggttatacactacagccaggaggtggaggagaaaatcaggctgattgaggaagcgctgtataaaaagtacggcgagatggataatatgcgctggcatgctattaagttcctggagtttgaccaggtggtgattgacgatcatcctctggacgatattgccgtgattcttccacgcaattatgaaaaacagattatcaatgagaagtatgattatatagaagaggtcataaaggagtgcctttttaataaggatgaaaaggctgctaccacggataaggtggaccggcttatgacccatcctgtatgggggattcctgtgttcttggggatcatggctctggtatttttcctgacgtttacagtgggtgattttttaaaggagtatttccagatgggtctggatatgttttccggcgcagtcctgtcacttcttaccagtgtccacgcggctcagtggatcacctccctgatcgtggacggcatcattgcaggcgtgggaggtatacttactttcctgcccaatatttttatcctgttccttgccctggctttcctggaggacagcggatatatggcaagggtagcgtatgtgatgaatgaaaccatgggtatggtagggctgtccggtaaggcgtttttacccatgcttttagggtttggctgtacggttcctgcggtcatggctaccagggctctggagagtgtgaaggacaggcggaggactattttaatcacaccctttatgtcctgttccgccaggctgccgatttacgtattatttgcggaaatgttttttccggacagggctctgatagtggcctactccctctatatcatcggcctgtgcatggcaatcctggtggcgtttatcgtacatatccatggaaagaatgacagcgcccagaacgccctgctgattgagctgcccgagtataagacgcctaacggccgcacggtatccatctatgtatgggataaggtgaaggactatctcagcaaggcaggaaccacaattttcattgcctccatcgtgctctggttcgtgctgaaccttgggccggagggattcgtgtctgacgtgtcccacagctttgccgcaatcatcggtcatgttctggtgccggttctgaggccggctggtctggggcagtggcaggtggcagtggcccttatttccggcctctctgcaaaggaagtggttgtctccagtttcagcgttctgtacggaatcagcaatgtaaactccgctgccggtatgacagcgctttccactcagctcgccatggctggttttggaggtgtgaacgcctatgccctgatgatattctgtctcctgtattcaccctgtatcgcggcagtggcaaccattaaacgggagacaggatcctggagatggaccataggaatggtgctgttccagctggccgtggcctgggcaggggcaatgctggtatttcagctgggcagtcttatatttggataaggaccgtacaggggaacagcctgggctgcccggaattttaaggtcagcaaatggaagcggggccggaggatgccatggtgacctcccccgtttcccttgaatagagatatacctgattggacaggcggtcttcctcagggacctcggaccggttaatgtgagtcaccagccggctcatctcctcataggatatatcgccgtcgtcaggcagcagcaggacttcgtggatgctggatggaaggatgattaaattcttttccaccccgtccgcgaagttttttaatacgtcctcatacaggatacaggcagcgccgttgataccggaacggttgctgagaacgtaaaacggagcaggggtttccggctttggatgggtttcttgaaaatggggattcagtccgcggttcatctcctcgatgatacaagccatgctggagatgacaggaggaaacagacggggagaattggacagggcagatgttttcaaatcttccagggaaatgttccagatgcgcagatgactgttgtgaatcatggcggtcatgaggccggtgtcatcctcatgtatgcagagatagaatacaatggccaggtccatccagggaatgtaagggacatccttcagaatggcttcattggaggcagcatgtatcagtttgcaggcaatattagagcgtatgccttcataatcggacagcatctcataattcaggggaggcggcgtatcgttctggcggtacatggtcagaagttctgccacaatctggtccaaagacattcccttacggtactggtcatagcagggattcaggtagatggcaggagcaatatgggcattccctctggtgatgcatagtccatccagaatgagtccgttgtttttgggaaccttgtgcagctccagctcatagctgcttcccagctctgcctccatacgtttttttacagcagctaaaaattgttcgtataccaaatgtataccccctttttgatgatatttatgtaaactgaataacagttccatatctttactgaactgaataataaggttttctgaactggctaataagggaaacttccgatgaaattgccttggataaatttaagatggataaaatgaatatcaaactataaatgaatatcagatattacatgaatatcagaaagtaaatgaattgacaccagcttaatccataaggccatgattgtcaatagacgggaaagggatttttttgctgccgggccggcagagacaggcacagggcggaaaaagccgtattctatcgggatttccaggggtatattgtcattttatcgactatatggacgggaatggtggggaaatcacgggaaaatggcaagaaatgaaattgacggatggtcatggtactgatatactcgattatagtttcagaaaggaatggagacgagtggacgaacatcattggagcgaggaccatctgatagccagtaccgctgtcctggccggggaaatcatgctgatcagcggagccgagattgccaggatagagggaaccatacattatatactggggtgctgccatgacagaaatgcacagaccatggtattcagcacaggcatttttgtgagtctggacagccctgagggagaggcgctgaccctggttcggagagtggaggcgcgctctaccaacctgaaccggatataccgtgtgaatgaggtgtccagaaggctgtgcggcggtcttatgagccctgaggaggcctaccgggagctggaggaaataaaagacagctgtcagtataaaagggagttaaaggccctcagttatgcgtttatcgccatattcttcggcgtggtccttggcgggagacctgcggattgcctgggagctgcggtgatcggcgggattctgggattggtggtatacgccatatcaggtttgggattcaatgatttctgcgtcaatggtctgggggcatttaccatcgggatagctgccctggccatgaaccggtggattctgacaggggccagtaatgacgtggttatcatcagcgccatcatgcctttgctgcccggcgttatctttaccacggcggtacgggatactctgaacggggattattcctcgggggcagccagaatgctggaggcagtggtaactgctctcgcagtggcggccggagtgggtgcgggtatggcactgttccatcagctgacaggaggaggcggaatatggtagctgcgattcaggtggcaggttcgtttatggcagtgctcagctttgggctggtgttggagatgccgagaaaatacctgggctggtcagggctgaccggcggggtgtgctggctggtatatctggtggtaaaggcaggcaccggctccatgatactgggagcatttctttccagtctgtccgtggcccttatgggacatctgtttgccaggattttcagggcgccggtcagtgtgttcctggtgccgggaattttacccctggtgcccggtacatccatctataacagtgtgtattatgttatccgcaacagcagggaggaatccatgtattacctggtggaaactcttcagattgcgggtgccatagccctggcggtgtttctgatggattctgtgtttaagctggtgggaaagaagaaaaggataaaagtgtaaaattaggacttgaagttttggaaaaaatatagtatcataatagggatgcgtctgtagctcagtggatagagcagtggcctccggagccgcgtgcgtaggttcgattcctatcagacgcattttgtattggtcaaaaaggggcagaatgcccttgtgaggattccgcagataatctgtttcagtgttggattatctgcggtatttttttggtacagattgcaatttgaaccgctttttgctagaatagagcggagatacttgaacactaacatactccgggcttcgcagtcgggacaggaggattgaatcatgagacaaaacagaagaaggacaggcagcagacgttctgcggacgataagataaaatatatgcgcatggcggcaatcccgctggttattgtgctggtgctggtggcagttatactggtgatggacaggaaaccgtcggataaggaagcatccgccccaacggacgtgtcactttcctcggatgaggatatcaatataagcagcgacagctccgcagcgccggatgatggcggggtggagccggacaacaaccagtacaccacggatttttcccagtatgagctgaaaaaggacgagataccccaggtaaaccagctgattagcgagtattttcaggccaaggtggaccaggatgcgcagaccctgtaccggatattcgggaagagcgatgatacagggctggatgcgcgaaaggaagaactgaagaatgaggcggtatacattgaggattatgtggatatcgtctgctataccaagccgggacttacagaggattcctatgtggcctatgtcacctatgaggtgaagttcagacgcgtggagacattggcgccgggccttatgtggtgctatgtggtcaaggatgacaacggcaattacattatccgggagaatgtagtgggtgacgaggcggattatgtggcgaagcagaaccagtctgaggatgtgaagctgctgtccaaccaggtcaatgagaggctgagacaggccattgagagcgatacggttcttgcgggaatttacaaggatttaaggaacggagcagtggtccattccttcgaggaagagaccgagacaggagacagcacggttatcctggaggaggaaggcggcgagacccaggaaaacggaggtcctcagccgtcccaggacccgtctgctgacgcgggccagaattcccagggagaagggatacagaatgtcccggccggacaggaaggtacaaatgcccgggaaagcgaaggaacaccggcagccgcccaggaaaaccaggggactgattccggcacagcaggcggttccggtacagaagaaagtgctggtacggcaggcggttccagtgtgaagatagaataggcttggaggataggattgaccatggatgtaaaggactttgattatgaactgccggaagaactgattgcccaggacccgctggaggaccgctccgcgtcgaggctgatggttttggatcgggaaacaggggagattcagcacagaatttttaaggatatcacggaatatttacggccaggggactgcctggtgattaacgatacaaaggtcataccggcccggcttttcggagtgaagaaggacacaggggccaaaatagagatacttttgctgaagcgcagggagaatgatgtatgggagactctggtgcgcccgggaaagaaggcaaagccgggaactgtcattgaatttggtgagggcctgctgacaggaaccgtggtggataccgtggatgacgggaaccgcctgattcagttccattacaaggggatttttgaggagatcctggaccagctggggcagatgcccctgcctccttatattacacaccagctgaaggacaagaaccgttaccagaccgtatatgccaggcatgaagggtctgcggcggcgcctacggcgggcctgcattttacccaggagcttttggctgagattgagggaatgggagtgaagattgcccacgtgaccctccatgtgggactcggcacattccgccctgtaaaggtggagaatgtccaggaccaccatatgcattccgagttttatatagtggaggagtctgaggcaaagaaggtgaatgacaccagggcggccggaggccgggttatctgtgtgggcaccaccagctgcaggaccgttgaatcagcttccacagaggatggtgtgcttaaggcaggaaccggctggacagagatattcatttatccgggctaccgctttaaggtattggacgccctgattacgaatttccatctgccccagtccacactggtgatgctggtcagtgcgctggcaggacgggagcacatactggatgcctaccgggaagctgtgaaggaaggctaccgtttcttttcctttggggacgctatgtttattgcagcccatccggctgctgagaagcggtagggattgaggaaatatcagaagaaagcgggaaaagatggaagaacgtttaaataaatggctgagccagatgggagtctgctccaggcgggaggcggaccgtctcattgaagccggtaaggtgctggtggacaaccgccctgcctccatggggcagaaagtaacgccgggccagaaggtggtatgcaatggaaaaatggtccgggtggaccggagccaacggcccagaccagtgcttttggcagtgaataagccaaaaggcattgtatgtaccaccactgataaggacagagctgagaatattgtggactttttggggtatccggagcggatttaccctgtgggaaggctggataaggattcagagggactgcttctcatgaccaaccagggggatctggtgaataaaatcatgagaagcggaaatgctcatgagaaagagtatattgtcaccatagataagccggtgacggaacattttctggaacagatggcgggagggatccggcttcctgagctggaccaggtgaccaggccctgcaaggtgaagaaggtggagcggaatacattttccatcattctcacccagggactgaaccggcagatacggcggatgtgtgaagcatgcggctgccaggtcaaacgtctggtgcgggtgcgcatcatgaacatacgtctgggcaatttgagaacgggcgcttaccgccagataaccaaggaggagtatgaggagcttacagggcttcttaaggactcctccagtctgtcccttaaggagagaaagaatcaataatcaggagaacagaatggaagacaggattcagagaatgaaggaactggtttccatcctgcgggaagcaggaaaggcttattatcaggaaagccgggaaatcatgagcaattttgaatatgacaagctgtatgacgagctggtatccctggaaaaggagaccggggtcaccttgtcaggaagtccatcgcagcaggtggggtatgagatattaagcgagctgcctaaggagacccacggttcccccatgctttctttggacaagacaaagagtgtggaggatttgcaggaatggctgggagaccagaagggactgctgtcctggaagatggatggtcttaccattgtgctcacctatgaggagggaactcttgcaaaggcggttaccaggggaaacggggagattggcgaggtcattacgcccaacgccagggtgtttgccaatatcccgttaaatatttcctaccagggacagctgattctcaggggagaggctgtcattacctattcggactttgagcggattaacagcggaattgaggatgtggatgccaaatataagaatcccagaaacctgtgcagcggttctgtccgtcagcttaacagccagattacagcggagaggaatgtgcattttgaggcctttgccctggtgaaggccgatggggtggacttccataactccaggaaggcccagtttgagtggctgaaaggccagggatttgaggtggtccactatgaagaggtggacgcagcaagcctgcctgcgtccgtggaagggtttgcaaaggcagtggaaggaaacgacattccctctgacggcctggtgctgacctatgatgacattgcttacggagaatcccttgggcgtacagccaagttcccgcgcaattccattgcgtttaaatggaaggatgaaatcagggagaccaccctttcctatattgagtggagcgcttccagaacaggactaatcaatcccgtggctgtgtttgagcctgtggagttagaaggaaccacggtcagcagggccagtgtccacaatctgagcatcatggaagggctggagctgggagtgggagataccataaccgtgtataaggccaacatgattatccctcagattgaggaaaacctgacacgcagcggggtaaaggatataccggaggaatgtcccgtatgtggaggcaggacggaaatccgcaaggtaaatgatgtaaagagcctgtactgcaccaatcctgactgccaggccaaaaagataaagagctttaccctctttgtcagccgcgatgcacttaacattgacggtttgtctgaggccaccctggaaaagttcatccaggcaggttttattcacgaatatgcagatatattccatttggaagaacacagggatgcaatcgtggagatggaaggtctgggacagaagtcttacgataacctcattgcatccataaagaccgcgtccaacaccacccttcccaggatggtgtacggcctgggaatcgcgggaatcggactggctaacgcaaagatgctgtgccgcgagttcaagtatgattttgataaaatgcgccatgccggagaggaagaactggtggcagtggatggtatcggcggtgttctggcccaggcctggatggactactttgctttagggagaaacaaccagatggtggaccgtctgctggcggagctgaacattgaaaaggaacagccggagacagccggggaggcagtctttgagggaatgaactttgtgataaccgggtccgtggagcattttgcaaaccgaaaggaacttcaggagctgattgaaagcaagggcggcaaggtcactggctccgttacagcaaagacagcgtatctgattaataacgatgcagcgtccaattcgtccaagaataaaaaggcaaaggaattaggggttcccataatctcggaggaggagttcctgcgaatgttgtagcacagtatctgccggctttggcagacgctgtgcggtttccgtgtggaattcagccaacatttgaaaggagagagcgaacatgcctataaaagtacagagagatctgccagcaaaagcgattctggaggaagaaaacatattcattatggatgaggacagggccatgagccaggatatccgtccgttggaaatcctgattctgaatctgatgcctctcaaggaagaaacagagacccagcttatgcgggcattgtccaatacacccctccaggtggactgtaccttcctgatgctgtccacccatgtgtcaaaaaacacgtcagccagccatctcaacaaattttatgttacattcgatgatataaagaagaaaaagtttgacgggatgattataaccggggctccggtggagaacctggagtacgaggaagtgaattactggccggagctgtccatgatgatggagtggagcaagacacatgtgacctccaccatacatatatgctggggggcccaggcggggctttattaccactacggtatccccaaataccctatggagaagaaactgtcaggtatttataaccacagggtcctggaccggaaggttccgctggtgagaagcctcaatgactttttcctggctccccactccagatatacgcaggtgagaaaggcggatatcttaaagcatccggagctggccattctggcggaatccgatgaggcaggggtgttcctggtaatgagccgggacggaaggcagatatttgtccagggccatcccgaatatgacaggatgacgttaaataatgagtaccacagggacttgaataagggattgaatccggaggtcccatataattattacgaggacaacgatccgttttcagcgccgccgctgacgtggcggaatacatccaatacgctgtataccaactggctgaactattatgtgtaccaggtgacgccttatctgttagatgcagaggagtaggcgattatgggaagggtgtaagatagaaaactaaatattcggacatctgaataagtccatgaatatgcagctgcattgcatattcacgggcttattttagtgtgtcaaaaatcaactgagcgccacagcaaagcatctcagataattattttaaaaacaaatataaaaggagaatccctacaatgacgattaaaactacattggcatatgactttttttcatcatattttacagaaacataaccgtcatttttacgtttgttggatacagatggttgtgtatgattctttttactctttgctttctttttggtcggactcattgattccagttcttttttgatttcttttcgtaggaggaaatcatcgtcgattatatggctgcatttgacacaaaatatttctttgtcattcggaagatcgcttccgcagtatgggcattgtttcataatttatccgggtatgtgttcaatctatatcccgcgtccccccttttcatatatttttatacaaaactatctgccggcaagtgtaatgtccattgcaatagtaagagcttcacataattgtaaaagcgaatcagcttataggctgattatacaacgtttgatgttatttcacaacatataggtttgaactttcactactactggaaaggcagacggataaccggatgtcagacgagggactggaacgcttttcgccgggcgggggaggggactataaaatgttcaatgggttggagcttgccgcgaaagaccgttcctgtccattctggtacattacagggacattgcaggatgcatgttttaaaaggatagtttcacctgacaagtattttaagggcatggtgtatataaagtgttaaaaaactgtgtatttattgctaaattttcacacaatcttaacgctgaagtagggatttgggattgattttagagaatttagggagtatactgttactaaagcaaaactttttggtaagttttcacaaaaaagcataagtaagtttcctggttaagtaacttgataaggtttttagggtataactttatgaacgcctgaaagcctgtctttgaagataaagtgtagaaaggtgtgcacagcctgctctaagatacacagattatttttgactataccgtaatagatgcggacaatttgcaccatcaggtatgcagacgcagtaagacgtgccatgggagcgttcctgtccggcaaaggaatactccaatccattcagttcaaagatacacagcgccatcaatcatatgacgtctcagcaaaaggaggatgagaaactaaaaagatggcataagctttcggttggcaagcggttcagcctatataaaacgaatggctgcaaataataggttgacgggctgttggggactaaaaccctacactttatatttaggaggagacattatatgctgcagatagttaacacaattaattcatatctttctgattacatacttgtatttcttttggtggctgtaggcctttggtatacagtcaaaacaaagtgtgttcagaggtacctttggaaaggtttaaaacagctgtttggcggtttttcactgcgaggcggttcacagggaggcggaatgagttcattccaggcggttgcaacagcaatcgcggcacaggttggcacagggaatattgtgggttcagccggagcgattcttgtgggcgggccaggagctattttctggatgtggataattgcatttctaggcatggctaccatttatgcagaagcaacactggcgcagaagacacgtgttacagatgcagagggcaatattcagggcggaccggtatattatatccagacagcctttaaaggcaaatttggaactttcctggcaggctttttttcaatcgcaattatacttgctcttggattcttcggatgcatggtacagtccaactcaattggctccacaattcagatggcgttcggaattccgtcctggattgtaggtatcttccttgttattatttgtggatttatcttcatgggaggtgtagatcgtcttgcttccgttactgaaaaattagttcctgttatggcggcattttttctgatcggcggcttgggagtactcgctatgaggcttcagtatattccggaaacctttggtctgattttcaaatatgcattccagccccaggcaattattggaggcggatttggtatagctattaagacggctgtgagccagggagcaaaaagaggcctgttctccaatgaagctggtatgggttccactcctcatgcacatgcgcttgcattggtgaaaaatccccatgagcaaggctgtgttgcaatggtcggcgtattcattgacacctttatcgttcttacactgaatgcattggttattatttcaacactttatgcgggaaacggccctctggcaaacggctatgtaggagaagcagcaaatacattaaagaatacaaaccttgcacaagtagcttttggtgttgtatacggcgacaaggccggcgctgtttttgtagccatttgtttattcttctttgcattctccacaattcttggctggaatttatttgcaaaaattaatgtaacttatttgtttgggaagaaagcacaaagaccatttatgctggttgctttagtatttatcttccttggaacaattggggaaagtgatttggtatgggcatgttctgatatgtttaaccagttgatggttattcccaatgccattgctctgtttgctttaactggggtggttacaaagatacttggggatcgggacaaataagtttatattcatattatacaaatagctgattgaaaatgggcgctgtgccaatgcttagggcgggattcgttagaatcctgccctgttcatgttccggcagagataaaagttgggttgtgccagtgctcttgacaagattctccggaaaggatagactgcatataaaatgaatgcggtgaacggcatgccgggatatgcaatacggatagcgcaacagggtcaggagacaaaaaaaaacgaaagcataggtggtatacatggaaaaacttgataatcaggcactcacgcgttttgagagattgtggaaaatcgaaggtgataaactgctcagggctaatatcatcccttctgctgttaaagatggagaaatctatcccgtagattactgtatatctgccattgcccggctgattcagcagccacatggtgctgaagtagtctgtggtatcagaaatgcattatcagaactctttgaagcggctgacactcaatttatttatccggatgagtcgcttcatgtatctttgcttggatgtacgcaaagaaaaaatacaaatgtatttgaacatgctcagattaataagatcaaacatatctgtataaaggaaatagaaaagaaagagccggcggaaattattctgagaggcatcggaattgtgggaaaccaaatttttattcagggatttcctcagaataggaactgggaagagctcagagcatcactgggtgaagaattggtaaattccggtgaattccctatatcatatgaagataaatcccctgttcatatgaatataatacggattgttgacgcagctccccatgttttggcatctcttcacagggctgtttcacggctgagggatgtggaattgggaacggtaaaattacagaccgtagaatttgtgattacggatttttgtgttacaaagaagaatgttgtatggctccataagatagaatgccgcaattcgtctgggaacagctgccgcgtatgattcaccggaaaatgcgcaagatttcttaagacaaccccatttgttttgattatactattgtggaatacacggcgcttggggaaccgggacacggtccaaaggtgccgtcggcaaggaggcaattgtgtaatgagcagtatggatgaggtaatcctggcaattaattttattgaagccaatctgacgaaaaaaatggatttggacatgatttccggcgcagtccattattccaaatatcatcttcaccgcgtgttttccgatacagtgggtctaaccattcatgattacattcagcgcaggcagctgacagaggcggccaagctgcttgttttttccggcaaacccattgtgcagattgcatttttatccggctaccagagccagcaggcatttaccaatgcttttacagccatgtataagatgcctcccaatatgtacagggaaaatgaacggttttatcccttacagctcaaattcaattttgaagggagatatgaaatgcttgacagaaaagaaaaggctttatgggagatttcgtttgcgtcggatgaggatattcccagctggatggaactggtgaggcttgtgattgacggctttccccatctgaatgaggaggagtatatccgggtcttaagacagaaaatcagcacagggcaggcgcttatcatgaaggacagaggctctgccatcggcatcatgctgttttcctatgaaaacggcagcattgatttcatgggaagccatccgctttacaggaaaaatggggttccgaaggccatgctggacaaggttatgaaggagctgcttaagggtaaggagatcagcattacaacctaccgggaaggcgataaggcagataccggataccggaaggagataaaggggctgggctttgcagaggcagagctgctggtagaatacggctaccccacccagcgttttatcttacagcaggaggaacgggagcatgagtgattatccagccattccgtttcccgatgaattagtccatctggaacaggtaagtgccaggctctcaaaagccctgcaaagggcagaggcatctgtcagtagggcggacagggaatatacggataccaagaaatacatggcggaccacaggggagaaatagacccccatgagatgttccagaatgaacttctgttaaagcagacagacaggacaggcgcctttgctgtggagatgcgggatcggattgtgaaattaaaggattccccctattttgccagaattgattttaaggaggaagaggaggaggaaggacagccgtactatatcgggagatttgcctttcaatatgaaaatgaaccgttgatttttgactggcgcgcgcccatatccagcatgttttatgactgcgaggttggagaggccggatttttggcgccggccgggtggacagcgggagagcttaccagaaaacgccagtttaaaatcaggaacgggatcatggaatacgcgcttgaaagctctgccaatgtacaggatgatgttttgcagagagagctgagccatacttccgatgaaaaaatgaagtccattatttccaccattcagagagagcagaaccagattatcagaaatgagaaagagggaacaatgattatccagggggtggccggatccggcaagacctccattgcccttcaccgtattgcatttttgctgtaccgttttaaggacaggctgagcgccaggaacgttacgattctctcgcccaacaaggtattcggagattatatttccggtgtgattcctgagctgggagaagaacccatttatgagatgagctttggggaacttgctgatatccagctggagggagtcattggttttgaaccggacagggatccttttgagatgcaggacagggcttggaaggagagggtgcggtttaagtccacactggactttgtttatatgatggaccagtacatagagcagatgccggagtttatttttgttccaaccgattatgtgtacgaagggtttagggtaactggtgaatggatcagggatcggttcttagcttatgggacctgtccggtaaagaagcggctggcaatggttgcagatgatatccatgaccgctttgagacggataatataatggaacaggaggtgccccggccccgggtgatactgaaacagctgaattccatgcttgccatgaaggatacgctggctgtctataaggatttctataagcggatgggaattgcggaacaatttgtcatggctgccaggaggacattggagtgggcggatgtgtacccgtttttatatcttcatgccgccttccggggattaaaggaaagccatatcaccaggcaccttgtgattgacgagatgcaggattacacgcctatccagtacgccgccttaaaccgtatgtttccatgccagaaaaccattttgggggattacggacagtatattaatcctaaccatctgcactgcctggaggatttgcggacaatctatgacaaggcccggtttgtggaattgaataagagttaccgttctacctacgaaattatgtgttttgcaaagaaaatcaaccatgtatctgccctggaaccgatggagcgccatggggaacctccggaattggttccgtgcctggacgcagcggatgagatcaggaagataagagaagtaatccgccgtttcagggcaggagggaatgtgtcgctggggattatcttaaagacggatgcggcggcaagggatatgtatgaggtgctggcaggatacgatggggcaaaaggaaatggatcggaaggctgcgaaaaggaagggagtagaagggaaggaagtaaaagggagggaagtgaaagagagggaaatgaagggaaaaggggcaaaataggagaaagcggagcaaaagaatggggtataaacttgattacccgggacagtgccagcttccagaacgggatatccattacatcggtccgcatgtcgaaaggcctggagtttgatgaggttttgattccccaggctgactcaagaacgtatgcctctgattttgaccgcagtctgttatatattgcctgtacacgggccatgcacaggcttacgcttacgtatagcgggagagaaacacgatttatttccgggcagaagctgtctggcaggcactccggaaaggagagccccgggagctgaatccggacggaggattttgacgagtgaaacctgaaatttcgggcagagaaaggcgggagctcatggagccatttacgtattgcaaattggagatattcataccggaaacccatttaaaggcgctgcagaaggcattgcaggaagtggacgcagggcatataggaaaatatgacagctgtatgtcatacagtccggtgacaggctgctggaggccgctggaaggcagcagcccgtttatcggtaaatgcggcattatcagcatggagccggaactgaaggcagaggtgacctgcaggacggagcggttagaggaaaccctggccgccataaagaaggtccatccctatgaggagccggttatcaatgtgattcctctgtacatgaccggaatggatatagtgtcctgataccggtcctattccggcagcccatgctgtcctatcaattgaatattgtcagtgaaacaggcggaacgtggatttgtaataatctatgattccgtcttttttcatgccggacagctccctggatagggcgctgcgatccatgttcagatactcagccatggcgtttctgtccagaggaatggtaaagggaaggccgttttccaaaccggaaaaattcttcagataggtcagaatcttatcacgggcagttgggcggagcaggcagtccagccgctcatgaagcaccagccctttttctgccacaatccacatgaagtttttgagaagctgtctgtggcaggggcagtttctggtacaattgtttataagccggttataggagatgaacaggaccgagctgccctgttccacggttacggataccggactcttgcggccgggactggcggccagtatgacaccgatttcacttccctcttttaaaagtgtgactgtaagggtatggccctgggaatctgttttgtatgattttcctcttcctgccaggagaatcccgaattttttgaccgggcagccctcctcaaccacaaccgtctccccggcataatttaccgactgcgccttaagacaggccaggaggcggcatacatctttttgcgacaggccggagaacagtttggcctgaatgatatcctgaatgttttcgttcattgtgatttggttgcctgcgcaacttacctcctgactgtattgtattataattgacgtgtacatgcaattaaaaaacacagataaaggaggagtcagggatgaacactggttttaccctattttttacggcctttccgcaatcctgttgtccttatctttccgaaaggacagagaaaagacaaatcgtgcggtcagaaaggctctattcatgatgctgggggtattgccctattttctgatcattttgctggtcacaggaaccgctttttttattctgccgcccaagacggttcaaactcttatggggacagagtcgggaataaggggaatgctcctggccgcagtcaccggggcggcagctcttgtaccggttctggctgtattcccggtggtttcggagcttcttaaaaatggggccgggacagcgcagatggcggtctttatttccacattgacaacggtaggaattgtcaccattcccctggaagtgaaatatatgggagtcaaagcagcagtattgagaaatctgttattttttctgttggcatttgccacatcctctctgctggaggtgttattatgaagcataaggtgataaaagcagagatgatgggaccctggaaggcagtagcggcggcgtatctggcggtatttatttttattccggaaaggtccggggagataggagcctgcgcctgcacgggtctggggcagtttatatggaatctggttcctgtattcctctgtgtgggtctgatggatgtatggattgaaagcgacaaaatgataaaaatgatgggagacagatccggtctctccgggatggggatatcgcttttgctgggaatgctgacagcagtgcctgtatatgcgctgcttcccatcgccggcctgctgttaaaaaagggagggcgcatttccaatgtactgattttcctgtgctccagtgtgagtgtccgaattccgctgctgctttttgagatatcatcactgggtatccggtttgcggcctgccggtttgttctcaatctggcagtggtattcgtgatttcctttctggttgaaaggtttctgtcagagcgtgacaggcaggatatccggaggagaaatcagataaatgaggagtgagctgcaaggagtgagctggcatgaaaatgacattatggctcagaacgcaaacggggacgcaaagggaaataaggattaaaagggaaacatggacgattaagcgggtttatggtagaataggatatcagactttttgaagaaggcaggtacgggcgggatgaaattaagggtattggttgataacaacacgtacatagacaggtattatctgggggaacccgcggtcagctattatattgaatgtgacggtatcaggctgctgtttgatgccgggtattcggatgtattccttaaaaatgcagaggctcttggaatcgaccttggcctggttacacacatggtgttctcccatggccataatgaccacacaaggggacttaaattcatgaaggagcgtctggagctgtcggggctggaggtcattgcccatccgtcctgctttgatgaaaaggtgtttggtgaggaatccatcggtgcgccctattctgctgcggacatggctggtatttgcagatacaggccgtgtggcgggccgtgtaacatttcggagcggctggtatttctgggagagataccggatgcagtggactttgaaacgagaaaagccattggcaggactaggataagaggaaaatggcaggatgactatgtaagggatgattccgccctggtttaccggggggaggaaggcatttttattataacaggatgttcccacagcggtatatgcaatatagtacaatacgcccaagcggtatgcggacagcagcgggttctcggcatcatagggggattccatctctttgaggcagatgaacggctggtgcgcacaattgactatctgaaatgctgcggtgcggaacaaatttatccctgccactgtgtatcactgagggcaaaagccagaatgatggaggtcttgaacgtgaaggaagtgggggtgggtatggagctttgcctggacggacaggctgcacattaaatcctgagtgttgcggcggagaaaggttttttgtatgagacagacagaaaagaacagaaagaaaacagggaacggcaattcaaaagcaagggaccccagatatgactgtctgcggactgtctcggtcatggcaatcatcatggtgcatgccatgccggtggaaacagtcagcgcccgccaatggtggtttaacagcattatgacgcccttcctgctgtcgtttgtgggaatttactttatgctcagcggtatgtttttgctggaacatggaacggagcgcatcggggagttttacagaaagcgttttattacggtgggaattccgtttctggtctatggccttatttactattgttataatgtccatgcggacggagtggttctgcctgtctggaagcatgccggccggtatctggcacaggtgctgacggccgggcttcccagggcaggccatatgtggtttatgtatgccattgtgtctttttatatctgtgcgccctttctgtccaggatggtaaaaaatatgacggaccgggaaatgaaggtgttcctgcttctgatgctgggcatccatgtggtggaggtggccggagaaattcttggactggacgtgaagccatgggcccagtttgtgctgtatacagggtgggtctactattttcttttgggatacggacttaagcgtttatgcaggaaggaacagtttcccatatttgcggtcctggcagtttttggcctggccatggatgtggctgcggatatcggcctttcatggtgggttccccaaactccccataagtcgccggccatggtgtttatttgcgccggagtatatcttctgtttgaatattatggcgggaaggtgcctgtatgggcgggaaagctgggaatatttgtcagcaggtacagcttttccatctatctgattcatttccttattctgagctactatgtaaatccggtacttctaaaggatatggcggcccgccattatatattgggaaccatggtttctaccgttgtgaccttctgtttatctctggcatgttccatggtgacggaccacctggcagtcaggccgttagaacggctggctgagaggataagatttgaaaaggataagatttagtccgcggaggtaacttaaaaacggcggctgaatgtacataagaaccaggaggaaatatgagcatcagtattgattttacagcaaaagtgctgcacaggaaaacctttatggaccatgtaaaggaattggctgaggcagaggattataacattcatatatgggatgaggggctcagggtggagctctgacccatgggggatttgtatataagctgggaacaggatccggaaaatccagagcagtggaatgtaagagaaaagggagacgaaatagcatggaaataaaggtgatagagggagcattttcagtctgcaggcttaaggagctgggacaggccgtgatagaggacgatctgtattttctgggcaggacagatgaggagatatccctggtgtgcaggactgaaagcgtgccccaggacactgctgcaagggaagatggatggagggcctttcggattcagggagaactggatttttctctgattggcatactggccggaatatcagctgtattagctgaaaataggattgggattttcgtggtatccacgtataatacagattatgttttgacaaaagcagatgattttgaacgggccctgggacttttggaaagccgtgggtatggtattgctaaatagatgcactggcagaatgggacaggtccggccggagatggatttaccgccacagtcctgttatggctatttccgaagaacaggtgcgttaatacgacggcagcctggaaaagatggagcgcctccggcaaagctgccgcatagttggccaaggccgggaaaatggatgtggcattagggaatacccgaaataaaggaaggatatatgacatactgatgtcatgttttgtatggtaacatgacagaagatccgcagcagaatactatcagcggagcttggaaagggatgggtgccatggcatacagtttaaaggaagtaacgatacgtacggataactcagaggagggaatggagcatatcggggagctttggcgccatattatggacggccgtctgcccattctctttgacagcgggcatcagttccgggcaggaatatcccctgtatccaggtacagcggttatgacggtgatgagacaggcagctacgacctgactgtcatggctgtcacaagtgacttttttactcaaatggatgaaaaggtgaaaatggggcagtaccggaaatatgatgcgtgggatgaaaacggcgacttgggcgcctgtacccggaaggcgtgggagacagtgtggagccagcagaagtcaggaatcatacacaggtgctttacagaggattatgagagcacggttccggctgagtatacaaaggacggaaaggcacattgttatctgtacattgcagtcagataagaagaggctgaggaaatggagttatattaagggggattaagggcttgctgccagcaatggcggccggcctttttgttttcctttctgcctgcaacctccgtacaggtgggggtgaaattgcacaatggaaaatgctaaaataaggggaaatttgtcgaaataggttgactatgtaaaagggcctatttataataaaaaaatatggttttttacaaaaattttataatcatggaaagttaaggaatggatatggacagttgggcagagatggaagagcagatcctgaaagaactgaatcttcacaggatgaaggatgatgctgaggttttcagcagattggagcgttactccggttcagaggccggggaagcagccgtggattatctggttcaggagctggaagcagcggggattgaacatgaacggcattattatgagcttatgagaagcctgcctgtacaggcttctgttactgtaaagaaatcaggagagcctgatttcaccgtggaggcaatagctgctgtatacagcggtgaagccaatgggcttacaggagaactggtctgggatgagatgtgtaccaagggccaattgaacggcatggaacaggaggaacggttccggacatttaagggaaagattgtcctgacctatgatatcagttttcctttctattatgaagcggcgagggcaggagcactgggcattgtggccatatggcccaaggacattcatcaccacgacaccatgggcggtgtatggggaacgccgggaagcagggacagggatttgtacccttatctgccctatgtgcagatattggggcaggacggcctgaagctgattgagatggttaaggcgggcactgcagccgtgggaacagaagcagccaaaggtatggctgtgacagctcagatggatgtggccatggacaaccgcatcgtaaggtccagtatgccggtggccaccattccgggcaaaagtgagagctttgtgcttctgagcggccactacgattcctggtatgaggggatgacggacaacggggcagctaacgtgctgatgctggagacagccagggcgctggaaaagtttaaggacaggctgaaccgcaccgtggtgattgcctggtggtccggtcattcggacgggcgttactccggctccacctggttctgcgaccatcactatgagtatctgagaaagcactgcgtggcccacatcaacatggatatctgcggatgcaagggaagcaatgcagtccgtttcgatatgagcggtatggagggagaggcgtttaacgatgaattccttgcatcctataacagccgcaaaccccttgcgtacagggctctggaccgttccagcgaccagaccttctggggaaccatgacccctgtatccattgctccccagttttatatggatgacggacagacgccccagcccccaaagagcagcgatatcttaaggccagcggccatgccggcggcctttggggtgggcggtcccttttactggtggcataccagggaggataccctggataagatcggggacgatgtgctggcccgggactgtgagatagcggcaaggctggtgctgcgctacgccatggaaaagccccttcctattgatatgaatggtttcatgggggagatgcagtcctattttgaggcctttgcagaggaactggacccggacttcgatgtggctccggtactggcgtccattgccctgacccgaaaatccgttgagaagctctccgatgccatccgggcatatccaaagcaggatgcggacagcatactcatccggacagcgggagaactggtgcgcttgaaatatacgtattccagcccttacggacatgactatgcagtggagcaccagccctatgcagtgttttcctccctgttaggagtgcacagggacaatacgcctgaggaccggtatctgatgtcgcagacggatttcatccgccagagaaacaggatgacaggccagctccatgaggtatgtgaggccattgaattacagctgtaccgctggcaggtacaatagcagatacaataatcactgagaaaggacacgtatcatgttacgttatattatcaaacgtattatatttgccattccggtgttaatcggagcaaccttcctggtgtttaccatcatggaccttgcaccgggcgacccggcacgtattatcctgggcagcaatgccacagaagcagccctggcctccctgagggattccatggggcttaatgacccgtttctggtgcgctacgggcggttcatacttgggcttctccacggggatttaggcacatcctaccgcaacggacaggcagtgttctccctgattatgggacgtctgggcaacaccgtggtgctggctacctcgggaatcgtattttccgttatcatcggcattccggtgggaattatatctgcaatcaagcagtattccgtcctggacaatattaccatgtttatcaccctgtttttgatggcagtgcccaccttctggtttgcgctgatccttgtcatcattttttcactgaacctgggctggctgccgtcttccggcatgcagcacggattcccggacaatcttatcagcctgattctgcctaccctgaccctgggatgcggatatgcggctctgattgcccgcaccacccgttcctcggttctggaggtggtgcgtcaggattacattgacatggccagggcaaaggggcttacggaaaacgcggttatctggaagcatatgttaaaaaatgccctgattcccattgtaactgtggtgggactgaacttcggaaccctgttaggcggctctgtgctgacggaatctattttttcctggcccggcgtaggacgttttgtggtggattccatttcctacaaggatacgcctgcggtgctgggaagcgtggtgacactggcaatcctgtttacaattgtgaacctgattgttgatcttctgtatgcgtttttggatccaaggattaaatctgaatatcaatcatcatggaagagggcaaagaaaaaatgagcacattaaagaaaacagagaacaatttgggacaggatgaaaaggtccgttccctgtggaagcagtcggtgattcagttcaagcacaaccggctggccgtggtgggcctggtcatcattgtcttattcatcgttacgattcttaccacgctggctgttgaccagattacaaactattctttttataacgagtatatcctaaagcaggacctttcgctgcgtctggcaaagcccagcctggcccatccctttggatgcgacgagtttggcagggatcttcttctgcgcattctgtggggaaccaagctttcatttgccatcggcgtggtggccattgcactgtccgtgatcatgggagcccccttcggcatgatagccgcgttttacgggggcaagaccgacaacgccatcatgcgcgtcatggatgtgctgctggcagtgccctacatgctgttggccatggccattgtggcggccctgggaaccagcacctttaacctgcttctggctctggccgtgtccggtattgcaaaatacgccagaatcgccagggcagcagtgcttacggtaaaggacagtgaatttgtggaggcggcccgggccgtgggcgcgtcggacggcaccattttgttccagtacatactgcccaatgccctggccccgattctggtgcaggtatccctgggaatcggtgattccattctggcagttgcgggcctgtcctatctgggactgggcgttcagccgccccagcctgagtggggggcaatcctcaccactgcaaggacttatatgagggatgcatggcatatatccgtgtttccggggctgttcttaatcctggctgtcatagcctttaacctgtttggggacggcctgcgggatgcccttgatccaaagctgaaacgataagggggagcaaaacgttgagtcatatattagaaatcaaagatttacaggtacaataccatacagaggacgggaccgtgtacgcccttaaccacgttgacctggagctggacgatggtgagaccctgggtctggtaggcgagacaggggcgggaaaaaccacgctggccaagagcatcatgcgcctgattcccgatcctcccggcaagatcgagggcggggtcattgaatttgagggcagggaccttttaaaggccagcggcgctgagatacgcgcggtcaggggcaaccagatatccatgattttccaggatcccatgtcatccctgaatcctgtggtcagggtaggggagcagatagcggaggtaatccgtgtccacgaaaaatgcaccaagaaggaagccgaagaaaaggccatggagatgttagagacagtgggcatcccggctgagagggcaggggatttcccacaccagttttcaggcggcatgaagcagagggtggtcatagccatagccctggcctgcaacccaaaggtgctcattgcggacgagcccacaacggcgctggacgtgaccatccaggcccaggtgctggagatgatgaggcgccttaaggataaataccatacggccacgctgctgatcacccacgatttaggggtggttgcccagatgtgtgagaaggtggccatcatatacgcgggggaggtagtggagagcggtgctgtcctggatatctataagcatactctgcatccctacaccgagggactgctgggagccattccccaggtacacctgcatgtacacaggctcagtcccattgacggcctgatgccggatcccatggcgcagaggacggggtgtccctttgcagaccggtgcaaatatgcatttgagcggtgccgcgtagagcatccgcggttcatagatgccgggaacggccacagagtgcgctgtttcaaggtagagaatgagttgaggaagggggctggggagtgatggaacacaagggactgttagaagtaagaaatcttaagaagtattttgatacaaaccgaggaccccttcaggctgtggacaacatatccttttccattgaaaagggcagaacactgggcgtggtaggggagtctggctgcggcaagtccaccctgggccgcaccatactgaggcttcaggagcccacatccggggaaatctggtttaatggggaggatattgtcaagtacgacaagaagcaggtaaaggcactgcggtccaagatgcagattattttccaggacccctattcttccctgaatccgcgtatgacggtgagccaggccatagaggcacccctggtgcttcagggcatttataagaaaaatgacagggaaggccttcagaaaaaggtcagggagatgatggatctggtaggtctggcataccgttttgccaactcctatccccatgagctggacggcgggcgcaggcagagaatcggtattgccagagcccttgctctgaatccggaatttgttgtctgcgacgagccggtctcggccctggatgtgtccatacaggcccaggtactgaatctgatgcaggatcttcaggagcagatggggcttacatatctgttcatcacacatgacctttcggtggtaaagcatctttccgacgacattgtggttatgtatctgggacagctggtggagagggccaagccggatgaactgtttgaacacccgctgcatccctatacccaggcgctcctgtcagccattcccatcccggatccgaccattaagatggagcgggagatattaaacggggagcttagctcgcccatcaatatgggggatggatgccggtttgcaaagcggtgtccaaaggcaaccccggaatgcacccgtcccatccgtgaggttgaggcttcgccgggacattttgtatcgtgtcatcttctctgcaaagaaaaccaggcagggagttgaatataatgaataatttcaggaggatatatgtatgaaaaaagcaattgccatgtgtctcattgcctgtatggtgatgacaggctgcggcggcagtaagggcggcgcaggagaaccacaggaaacagtggccggcagtgacggacagaacgtgaagatcaaggatgaaatcatattctgccagggcaacgacctgaccacactggatgccaccatcggacagcaggagagggcctattccatctccaacaacatctttgacccgctgtttacctatgattccgatatgaagatgcagccatgcctggccacggaatatgagtgggcggacgacaccaccctgaagcttaccctcagggaaggcgtgaaattccatgacggatccgatatgaacgcggaggacgtaaagtttaccctggaccttatcgaccagagaggggcgctgtttgtaggaaactatgacggatgtaccattgatgacgattatcatgtgacggttaagctgaaagctcctaaccctgctttcttaagcatactgaccctgccccaggcttccgtggtaccggcggagtatgacgaggcggccttcggagccaatccaatcggcacaggcccttacaaattaaaagaagctgtggagggcgattattataccctggagcggtttgatgattactggggcggtccggccaagacaaagcttctgaccatgaaaatcgtaccggaggcatcccagcgcaccatgatgttagagacaggcgaggtggatgtggcttatgaggttccgaacaatgatatctcccgtatccaggagaacaaggaccttcagattctcaccagcccatccatgaaaatcatacttatggagctgaactgcagttccgacggccctgtgggcaacccggatgtacgcaaggcagtggagtgcgccatcaacaagcagaccatcgtggattccctgctctacggatttggaacggtatccgacaacattatccctcagtccgcccaggattacagggaatacgagaccaacggatatgacccggaaaaggctaaatcccttctggcccaggctggttacagcgacggcatccagctgacactgtggacaaactccaaccagaccaacacagagattgcccaggtgcttcagagtcagctggctgaggtgggaatcaaccttaacattgtgacccaggatgataacacctccttctcactgattgaggcgggcgaggactttgacctgatgctggatttctggcagactaatacaggacacgcggactatgtattcaacggaatgctgctgtccacttcggtcaacaacttctcccggtactataatccggaatttgacgagacatatgtaaagtatgcatccaccggcgagggcgaggaaagggaagctcttttgaagcagctttacgatgatatggttacggacaccccaattatcggcctttacagcgagacaaaggtgattgcagccacatcaaagctccagggactgatgctgagccagattggcgcgcatgagtaccagaatgcggtggtgacagaagactagggacacactctggtaccgggcttaccggtagttttgcggcgtagcaccgggagggcctggaggccatcatatgaccgggaggaacttttattcctcccggttttgcattaccagggagcgtacagggaggggatccgggaggagctgatacagctgtcccatggctttcaggtggagacgggaatggcaggacgccgggattgtccctaaaataaaaggatgttataataaatgaaatggccgtcaggccggtcagggggtgtcagtttgatgaagaagatgaaggtaaatctgcggattaagataatatacacatgtattatcgctgtatttgtcagtgttttccttatcatgcagtattccttcaaccgcagcaggaatctgctcatcacccaggaggcgggcatcatatcccaatatatgaaccgcaacgagctggcgcttacagaggtgacggattccatccgtaagctgtcggccgcatccagcaccaacaagcaggtggcgtcctatctgaaccagtcatgtgatggaaatatatattcttcggagaatgtgagccgtatccgggcagtggaggagacgctgaccttttaccggaatatattttttgattaccgtctccactatatcatcctgggagcggacagcacggtttacagcgtggcggacgggattgacaacagcagctattttggggagaagtttgcccagagcgtcaggcagcagccgtggtaccgggagtttctggagggaaaggaggtatccgggtggattgccccctgtatttacaatgacaagggggtatttaaggagaggattgagtctgggaaggatgaggatttcatcttattcatccggcggattaaggattataattcccttaaattccttggggtatcctttgtatcctttcccacggaaaacctggcgcaggtgctgataccctatgacggggcggtgctggctctctttgataagggaaaccatctgatttacgccacggagcaaagcgatatactggatgatatatctgccggacggctttcagaggatttacaggaggaccaggattattttcattatacaaaggacggccgggagtatctggtgaaccatgtgaccatggccggtacaggatggcgtatggtgaacctggtacccctgtcccatatcacccaggcagtggacaagcttcacagcactgtaacctccctgacggtccttatggccctgggagcctgcatggtctgccttgccatgtatttctatgtcaacgcgcctcttaaccgtctgatccataaggtgagcgaagtcaatatcggagggactaaaatcgctgacatggaggatgcaaagggcagacagatgcctgtattcggaattgtggaggcagagctggagatcagcaggatggtggattatatagaaaagctctctgcccagaccatcaagcagaaggaaatagagcagaatctccgctatgagatgctccgggcccagataaatccccattttctctttaacacgttaaatgtaatcaaatggtcttccatgatatccggggcaggcaatattgcggacatgattacctcccttggaatccttctggagagcaccatgaaccggagggaggaggaagtgcccctaaaggaagaaatacgtgtggtgaaggcgtgggtggaaatcaagaactggggacttaagaaccggattgaactggttacagatatccaacaggagctggaggaattcaaggtgattaaatttttccttcagccgttagtggaaaatgcggtgctgcacggtatgggggaggcaactcacggcaccatttgggtcacggctgaaccgtatggggagcgggtatgcgttacggtgcaggataacggagtgggaatggaacagggaaaactggatgagatactgaaggaaatggatgaaaacagtaaaaaacgccatgtaaccggcatcggactgaccagcattcatgagctgatgaaagccaggtacgggccggattacgggctctatattgaatccaggataggatacggaaccaaggtttttgcggtatttccatataggagaggtagtgagacatgctgaaggtaatgattgtggatgatgaaatcatagtgagggtgggttttcagtcctgtattaactgggaggcctacggatgccaggtggtgtccacctgcgaatccggaggggacgcagtggagtatatgaaccgggatgtgcctgatatcgtgttcacggacatcatgatgcccggcatggacggaatccagctggtgaagtatataagtgagaaccacccggatacaaaggtggtggtattgagctgtgtggatgagatcgattatgtgaagaaggccattaagctgggggcagaggattatatacttaagctgtcctttacccaggatacactggtggagctcattacaagattaaagtccatgattgaggaggagcggaagaaggcgggcagaggcagtctggatatgagggtgcagtcctttaaccgggaggaggacttaaggacactgctgctgggaaatcagggacctggggacaatgaaatgctcctggaccgtctgggatatacctacaatccctttgagacctaccaggcaggctgttttctggtggacgacgaaagaatgaaccggcccggcagcggtacggactcccatatcagaaagtatggacttttgaacattgtccgtgagtatcttgaaaatctgcctaaatcagatctggcctttaccggcgaacatgaaattgtggttctgttcaggagagaagggggggagagcccggcctgctttttcccggacaccctggatttgctcaaccatgccttaaagacccatctgaacctgaccctttccatggggatgggacaggagtgcttaagcaggatggatattccggcaggatttgcacaggccaggaggatggcggcactgcgcttttttgacggtccggccgcctttcactgtggcagggaggcagcagcagggcgccccttcatcgcaaaacggagcgtccagcgcaatatgcaggaggccatattcaggcaggatgccggggaggcgttccggctgattgacagctggtttgaggagatggcagggctccggtcctacgaccagattcaggccatacgccggggcgtggtggagacctgggtgtttatatcaggatattccattcctgagggagcggatatgcctgaatatgatgaaatatactccacaggcgatttttggggagccgagacgctggcagatttaaaaggatgttttaaggccgcggtgcagtcagtggtggattatctgatggccaataagaacgccaatccggagattaccagattcctccagtatctggaggaccatgtggatgaaaatataagcctggaggaagcggccggatggtgtgccctgggaaagagccagttctgcatcctgtttaagaaggctgccggcgacacctttgtaaattattttaacgggcttaagatgaaaaaggcgtttactcttttgggcagttccaatatccaggtacaggaggcagccagccgtataggcatacatgatatctcctatttcagccgtctttttaaaaaatattacaatatgagtccaagcgacgttaggaaattgtgaaaatcatacaatagttaaaaagaatcatacaataattcaaataaaaaatagggattattttgggcggacgataataccaataatccctatttttttaaattccaaatcaggggcggaacatttatactatgcttacagtaaatgaaaacgtgtatagaaggagggtatttatgaaacgtaagttatgtctggctttaagcgcggtaatgctggcggggtcactttctggctgttccggggggaccagcggactgccgggagatacgtccaaggcttcggaggctccggccggtaaggaagcagagggaacaaaaggggaatcggccgcaggggaggccggtgaaaagccctatgccgggacaacaatccgtgtcctgagcatgaccggacagatatcagatgcaattgaagcgtatctggatgattttgaggaggaaaccggcatcaaggtgaatctggaactgtacggggaagcccagcttcgtgagaagataaccacggaatttctggcaggctcctccaccattgacgcattcctcatgagcccgctgcaggatatggcggcttacagcaataacggatggattgaacctctggatgaatatctgaaggatccggattttgactgggatgatttttcgtcggcgcctatggagcagattaaaattaagtctgacggcgccatcggagcactgccgctgtattcctctgtgcagctgatgttctaccggaaggatgtatttgaggaaaagggagtgaaggtccccacgaattatgatgagctgctggatgtatgcggcaaaatcaacgacccggctaataacttttacgcgattgcctgccgcggcgagaagatagcccttacctcccagttctcaccgttcctttacggatttggcggcgcttattttaaggacggaacatgcgcctttaacacaccggaaaatctggaagcagccaggttctatgggaagctgttaggtgattatgctccggaaggcatactgacagcaggatattcacagatgacccagctgtttaatgcggggcaggtaggcatgtgtgtggatgcaattgccctgtaccagaccctgattgatcccaatgagtcttccttctacgacaaggtgggagttgctcctattccggaaggtccggcaggacgccagtcctataagcaggttgtgtggggcgcatccatttattcaggctcaaagaacaaggaagctgcatgggaattcctcaaatatgcggcaggcaaagatattgccgccgacatcactccaaagggaatgcctaccttcagggcctctgtatgggaagatgagcgtgtgacagctgccatgccggaagattacatccaggcttacaatgaagagattcaggctgataccaccaaccagtacggacttccccgtatgaccgcggtatccgaggccagggacgccatgggcgaggctatcgtgtactccatcgagactaagggagagggagcagatctggaaagcaagatgaatgcagctgcagaaaaggtggaccagctccttaaggatgcgggagagtatggcgcggattatccctacgaggattagagtatgtctgaaagcaacggaaggagcctgtaacaaggctcctttctaacaacagagagggatgtatatatgaacaattttgtcaacaaacatattaaatgggtcttttcccttcctgcccttatatttatgatggccatgatcgcggttcccattgcaatgaccttcctgttcagcctgaacgactggaacctgctgatgggaaacggaatgcgctttaactggggaaagaattatctggatgtgctggccagcagggaattctggcagtccttaggaatcacattttactatacggcaatcgccacggtggcggaaatgcttttgggccttgccatcgcccttgtgctgaataaggatttttggggcaagaacggggtaaaggcagtggtgctgctgccatacatgatggcgcctgtggcagtgggacttatgtggatgctgttttacgaaccatcctccggcctgctcaattacatcttcacaaccgtgggacttcccaggtctgcctttgtgtcggccaaacagactgttatccctgctattgcggcagtggagacgtggcagatgacgcccatggtagtgatcgtatgtctggcaggactgtcctctctgcccacagaccccatggaggccgccagggtggacggggcaacacctatccagacatttttccaggtaaccctgcctctgctcacccagaccctgttctccatcggtctgctgcggttcatagacgtattcaagtcctttgacctgatttatgccatgacaaagggaggaccggccaatgcctccaggacactgaacctgtttgcctatgaaacggcattttcctattacaaattcggcctttcctctacaatgcttatgatattgtttgtgattgtgctgctgctcagcgttttggtcatgaagatacagagaaagttggtggcgtattatggcggttaaaaaatacagggcaaagaaaattatatcaaagttattattcggaatcctggtgctggtcattgtcataccgattctgtttccgctgtatttcgtgttaatttcatcctttaagaatatggcccaggtatatatcatgcctcccaagctctttggattcaaaccgatactggataattacatttacatatttaagacacagcactatggaacctatatgatgaactccaccattgtggcagtggcgtcaacggccctgtccctgcttttgggagtgccggcagcctatgccatagccagatataaaatggggaaggccaatacggcaatcctgacagcacgccttctgcccaacatatccattctgctgccatactatttcatattttccaagctgcgcatgatagatacctacggtgtgctgattctcagccacatggtgctgtcacttccgctgattgtgtggattatggtgggttttttcagcgatttgcctctggaactggaggaggcggccattgtggacggctgtaccagacagaaatgctttaaagatgttctgctgcccatcagcgcgccggggctggtgacctgctccaccctttcattcctgggctcctggaataacttccagtttgcccttatactcagcggtgaaaagacaaggacacttcctgtctcattgcagtatttcgtgtccggcgcggatattcgctggggacgtatgctggctgccaccattgtggttattgttccaaccatcattctgaccatgatactccagaagtacattgtgcagggtatgacggccggagcagtgaagggatagattaaggccaacggtcaggttatgtgagaatacaggacggaggaggaaaaggtggagataccggtactggtccatgggaagggaatctatgattccgatgacatgaagatgaaatacacgggaatgattctggaaggaagccggattaaggagatgggttcctttgaggaactgggtccggcatatcccggggccagggtcatggatttttcagactgctatatcctgccggggctggtcaatacccacgtacatctggagtttacgccctgccgggacacctatggcatctaccggagggaggacaggaaaacccgtctggccagggccgtggagcacgccgggacccttctgcgctcaggtgtgacaacggtccgggacgcaggaagctccatggagctgataggagctctgtggggcggggatgcaggcgcaaaaccggggacagagctgccgaggattcaggcagcgggtatgccccttaccccggacggaggccatctggcctttctgggaaaaacgtccaacggtacggagggattgatacaggctgtaaaagaacggaagtcagcgggctgcggctgcgtcaagctgattgtcagcggaggccagctcaccccgggctcggtacctgagcatgactcctacagcagggaagaaatacgtgcagcggtggaggcggcccatgagctgggactccccacggcagcccactgcctgacaaccagttcctatgtaaacgccatggaggccggggtggacagcgtggaacactgcgcctgtttcaggagaaaccccttcctgggacttttggaacggtgttatgagccggatgtgatggaagccttccgcggggaccatcggtattttatgattgggatatctaataattaccaccaactggaccaggtcagggaaggtgtgagaaaaccggatgagagagaagcattcctcctggaacaggaaaagcgggaatgtgaaatattcggccgcctggcggatttggggatgcgtcccctggtgggaacagacgcaggatgcggatataccttttttgacgaaacctggctggagatggagctgttatgcagcaggtgcgcccttacgccggaaaaggtgattcacgccgccaccctggagggcgccggggcattgggctggggggatttcttggggcggctggcccccgggtatgaggcggatttcatagctgcagaacagaatcctctccgggatataaaggcgctgcgtcatataaaacatgttgtgtgcaggggaaaaatcatagagtagggagaatggatatggaacacatgtatgaattaaagaacacagatacaatcatatcacccagcctcatatattatgaggagatcatcagggaaaatataaagaaggcaatacggacagcaggaagccccgaacggctgtggccccatgtaaaaagccacaaatccaaggatatggtgcggatgcagatggagtacggcattacaaagtttaaaacagccacagtggcagaggcggagatggccgcagaggcaggggcagaaaaggtaattctggcctatccgctgattggtcccaacatggaacgtttcgtgaaactggcaaaggcgtatccggatacggtattctacggtgtggaggatgacctggcccagtttgaggctctgtccggggtgtgcgtggaacacaatgctgtgctgcccatgctggtggatgtaaatatgggaatgaaccgtaccggagtgcccattgaacggctggaggagctctaccgttctgcgtcctctcttccggggcttcgtctgtgcggaatgcactgctacgacggaaaccacaataataaggacgcagctgtaagacaggcccaagtggatgacacggataaaaaggtgtcggacatcatggaacgtctgaacggggatggaatctgctgcgagctggcagtggcaggcggtaccccttcctttccttgccatgcgggcgctacacggtggtatctgtccccgggcactgcatttataacagatgcagggtattacatgaacctgccggatttggattttattccaggagctgccgtgatgaccagggtcatcagccatcccgccaagggcgtgtttaccacggacctgggctataaggctattgcttcggaccccgcgggacagcggggctatatcgtaggtctggaggatgcagtgcccattatacacagcgaggaacactgggcattccggctggaggatgaaagcaggataccggccataggaagctgcctctatgtgattccaacccatatatgtcccaccactgcattgtatccggaaattctggtggcaaaggacgggcaggtggcggacagatggcaggtgaccgcgagaaaccgcagaattacatactgattgtaccggaacaaggaggtattttgtggactgtattgaactgttgagagagctgatagggtttgacaccgttaatcctcccggaaatgaaaagccggcagcccggtatctggccggaatcctggagcctatggggttcaagtgcgaagtgcaggatttaggcggcagccgggcaaatctgattgctgtgctggacgggggagacgggccggagcttatgctgaacggacatctggatgtggtgccggccgtgggagagtgggacagcagtcccttttccatggaagaaaaggatggaaagctttacggcaggggaacctgcgacatgaaaggcgggatagctgccatgtgcgaagccgccatgcgctgcgccgccaggaaagagcccatgaaggggaaactgaaacttttatttgtggcggatgaggagtgctccaatctgggtacactgagttatctaaagacccatgagagaagcgattatgccatcataggagagcccacccggctggaggtggcggttgcccaccgtggagtatccagagattatattgatgtaaagggagcccccaggcatgcagccctcccggccggggaggaggacgctgtgatgaaggcatgcagggcagtccgggcggtaaaggatatgaatgaaacgctgcgccatatcacacacccggtcctcccgcctcccagcattgcggttaccatgatggagggatatgagaaggacaatgtggtgccgggaaatgtacgccttctcctggacttcaggattcacccgggtatggaccatgaacaggtggggcagtttttggacaaaggctttgaacaggccggcattgacggcttccagaggacgctgcatttttatatgcccggcggggagattccacaggatgaccggtttgtgaagctgtgccttgaggaacgggaacgccagtttggaatcaaatcagatccacagccctttgacgcatcctgtgaacagtgtttcctggcaaaagagggaatccagaccgttatctgcggtcccggagatattgcccaggcccatacagtgggggaatttacctgggaaaagcaggtgcgggatgccgtgagcctgtatgagagaatcatagacagggttctgtataaaacaaattacatataaataaggagagatgaagatgagagacgtatacgaggttttaaaagaaaaaggaatcactttgccgcagccgcctgccaagggaggcgtttatacaccggtacaggagctgggggagaaatttctctattgctcaggctgcggtccggatctgggaaacggcaatacggtagtgggcaaactgggaaaggacctgacagtggaggatggccagaaagcggcatacaactgcgtgctgaacctgctggcaaacttaaatgaaaagaccggggatttgaaccgaatcaagagattcgtgaaggttctggcttttgtaaacagtgcggatgactttgggatgcagccccaggtggttaacgggggctccaatctgattgccggactgttcggtgaggaagcaggacttccggcgcgttctgccattggaaccaacgcccttccggggggaattgcttgtgagattgaggttctggtggagcttaaatagaagcgggaacatataaacaggaatcaagagagtggacgggacggacgtaaatatggattcgtacccgtccgttttctgtctgtttttaaattattcttggttctgtccatttctttgattccttatggcttgtaaaagcctgccccctgctatataatggatagcataaaaagtcaggacatcccaaaaaggggagctgacaacaggatacggaggaaaatgcaatgaaaatggtaatcatcgagccgctgggagtggaagaaggaaagcttttagctatggcaaaggagtcccttggggacagggtggagattgtgtattacaacacaaagacaacggacaccgcagagctgatagagaggggaaaggatgctgaaatcattgtggtatccaatctgcctctgaatgcccaggtcatagaaggatgcagaaacttaaagcttctggctgtggcatttacaggcgtggaccacatcgccatggatgtgtgcagaaagaacggtgtcatggtatgcaactgcgccggatattccacctgcgctgtggcggatctggtgttcggcatgttaatcagcctgtacagaaacgtgattccctgcgacaaggtctgccgggaggagggcaccaaggacggactggtaggatttgaactggaaggcaagacgtttggcgtggtgggaaccggggccatcggccttcgtgtggcagccatagcccaggcatttggatgcagggtattggcttacagcaggacagccaaggatgtgccaggcgtgcgctatgtggatctggagacactgctggcagaaagcgacgtggtttccctccacacccctcttactgaagagaccaggggactgatgaatgagaagcgcatcggattgatgaagaagaacgcagtgctcatcaacacggccagagggcctgtggtggacagcgatgcgctggccggggccctgaaggagggcaggattgcaggcgcctgcattgatgtgtttgaaaacgagcctccggtcagaaaggaccacccgctgttttcggcgcccaacaccattgtgacgccacatgtggcatttgccaccaaggaagccctggtgaaacgggctgttattgtgtttgacaatgtggtaaactatctggatggaactccccgaaatgtgattgggtgatatttgtatgaaaaaagtcaggaaacatattatattttccggcagggtacagggggtgggcttcaggtacacctcctgttacctggcccgcccactgggccttaccgggtgggtgaagaatctgtggaacggcgatgtggagatggaggtccagggagacccgctggcgattgggcgattcttaaggaatctggagcagggaaggttcatacacattgaacatatggaagcagaagacattccggtgattgaagagggcagtttcagggaaatatattaacagcagtggaggttttatgtttgggataattgtggcaggaaaacgggtatatgataaatttgctgaggatgagatgacggtctacgcggcccaggtctcattttttatcatactctccgtggtgccctttatcatgctgctgctgacagcggtccagatgattcccagcatcagcaacgccaggttcatggaactgattgtgggcctggtgccggtggattacaagtccctggccttccgggtggtcaatgacctgtccttaaaatccccggcaaccatgatttccgtcacagccgtcacagccctgtggtccgcgggccgcggcatgttcagcgtggccaggggcttaaaccgtgtgaacggccacggggaaaagcgctggtatgtgattaacaggctgatttgttcaggatacaccattgtgtttatcctggtgtgcattctgtccctgggcctgctggtgttcggcaatatgattcaggcgtttatggtgagccggtttcccatcatagcagacgtgaccacccacatcatcaatttcagggctctgtgggcgttaatgatactgattatatttttcctgggaatctatacctttgtgccggataagagtctgaagctcagggaccagcttccgggagccgtgttctccaccgttggatggatggccttctcctttgccttttccctgtatttcagccatataggggggaagaattactcctatatgtacggaagccttaccgccattgtgctgctgcttctgtggctttatttctgcatgtgcatcctgttcttcggggcggaaatcaactatttctggaaggaactgtttcccggggaaacgaaggaatgaccggattatgcctgctctttggataaggggcgggctgtttttgtttttttggtggaacagtgaggcggttctgtcaggaaaggggaggctggcctgtaaagtaatccagaaattccttcatcacagccgacaggggtccgtttttccggcagaccagcgtaatccggctggtgaagtcacgggtatccagaggcttcatgagaatgtccggccggacgcacctggcgatagaggccggcaccaccgcgacgccgctgcctgtctccgcccatgtaaggctggtccgggcatcgtcgttgatgcacagataatccgggcagtccggtgcaaacaggcggtttaacaccccttcccatctgcggtacacaaccagaggacaggagcacagttccttaagggaaatagtatccgccccgggacggggaaagaagcagcgttcccccacagccatcatgatttccccggacagataaaagcagtcatagggttcctcgggaaaagggctgcgcacaatggcagcctcgatgattccggtattcagcttgtccaggagctgatatgtattaccctcgtagatgcggaatttcaccctgggatgctcctggcggaaggcggcaatctttcctatgatgggttcggtttccacggaagaaatcatacccaggcgcagggagcccagaagtccctgccccatctgttccagttcctccagcacagcccctgtcatgtccaggatgccctgggcccgttcgtagaggaccttgcccgcatctgtcagcaggatgcttcgtgagccgcgctggaacagggtcagccccagttcctcctccaaaagcttcatctgggtgctgaggggaggctgggaaatgtggagcgccttggctgccgccgatatgctcccctcattgacaatggcagtaaaatattccatctgtttcagattcaagatcggaatcctcctattcgttaaacgtatatcatatatataaaaacaatattttatatatggttgattctatgttataataccaggcagtgtgaaaaaatacaatggattccggcagaggagtgaaagacaattatgaaacgattgttcagctatatgaaggattacaagctagaaagcatactgggaccgctgtttaagatgctggaggccagctttgagctgtttgtgcccctggtggtggcccgtatggtggacgtgggcatacggggcagggacagcggatatattcttaaaatgggaggcgttctggtgctgctggccctgattggcctggcatgctccctgacagcccagtattttgccgccaaggcagccacaggggcagccacctccctgcgcaatgatctgttttcccatataggaagattgtcctacacagagatagacacagtgggcacgtccacactgataacaaggatgaccagcgacatcaaccaggtgcagagcggcatcaacatgacgctgcgccttctgctccgctcaccctttgtagtatttggcgccatggttatggcctttaccgtggatgtgcgctcggcctttgttttcgtggtcaccataccggtgctctgcgtggtggtgttcggcatcatggcagtcagcatgccgctctataaatccgtgcagagacagctggacaaggtgctgttaaccaccagggaaaacctgctgggggtccgtgtcatccgcgcctttaacagacagaaaagtgagacggagaaatttgaccgggaaaacggaaacctggtcaggatgcaggtgtttgtgggaaagatatccgccctgttaaaccctgtgacctatgtcattataaacatagccgtggtggccgtcatatgggtgggagcggaacaggcggacagcggtatcattacccagggaaaggtgattgccctggtaaattacatgtcccagattctggtagagctcataaagatggcaaacctgattatcattatatccaaggcagttgcctgcatgaaccgggtggacagcatatttaaggtggagagcagcatcgaggataaggggaggcacggctcccggaaacccggttctcagaattccggttctcagaatcccggcccgcagaatcccgcattacggattcccaaggtagagtttaaagatatggaattcgtgtatgcgggggcaaaggagccggccttaaaggatatttccttttgtgccatggcaggacagaccataggcgtcataggcggaaccggatccggtaaatccaccctggtgaacctgattccccgattttacgatgccgcctcagggcaggtcctggtggacgggacagatgtaaaggaatattctctggatgagctgcgggacaaaaccggagtggtgccgcagaaatccgtactgtttaagggaacgctgcgggacaatatgcgctggggaaaacaggacgcgtcggatgaggaaatctaccgggctctggatacggcccaggcccgggagtttgtggattccaagggagagggactggatctatacattgaccagggaggccataacctctcaggaggacagcgccagaggctgaccatagccagggccctggtgaggaggccggaaatcctgattatggacgacagcgcttcggccctggactttgccacggatgccaggctgagaaaggctatccgggagaacaccggggatatgaccgtattcattgtatcacagcgggccactaccattaagagcgctgacaccatcctggtgctggacgagggtcgtctggcaggcatgggcacccataaggagcttcttaaggactgccaggtatacagggagatttgtctgtcacagctttcaaaggaggaggtggaacgggatgagcagtaagaagaatgcattggacaagaacaggagcagggagaccctgaaacggatccttaaatatatcagccaatacaagtggagcgtcatcctgtctctgtttctggcccttatcacagtggcccttactctgtatgtgccgattctgacaggccgtgccgtggaccgcattgtctcggccggacatgtggattttgcagggttaaagggaatccttataacaatattgggagcagtggctgttacgtccgtatcccaatggcttatgaaccatatcaacaacatcatcacctaccgggttgtgaaggatatccggaccagggccttcaaccagctggaggtgatgcccctaagctatatagatgtgcacccatccggagatatcataagccggattatcgcggacatagaccagttttcagaaggccttctcatgggatttacccagctgtttacaggcgttctgaccatagcgggaacgctgctgttcatgctttccatccagcccgtcatcacggctgtggtggtggtgctgacgcctatatccctgtttgtggccagctttatcgctaaaaagacgtttgtcatgttccggaagcagtcagagaccaggggagagctgacctccctgaccgatgagatgctgggcaatatgaaggtggtccaggccttcggacaccaggaagaggcacagaagcagtttgaggagattaatgaacgtctggccggatacagcctgagggcgacctttttctcatccattaccaatccggccacccgctttgttaacagcctggtctatgctgccgtgggcatcacgggagcctatggggctatccgggggctcatcaccgtgggacagctgaccagtttcctcagctacgccaaccagtacacaaagccctttaatgagatatcaggggtggtgacagagctgcagaatgccctggcgtccgctgcccgggtgtttgagctgattgatgagaaaaccatgatagaggacagggaggacgcaacagtactgcgcggagcaaagggcagtgtggatctggagcaggtctgcttctcctacacgcctgagaaaaagctgattgaggattttaacctgtcggtacagcccggacagagggttgccatcgtgggacctaccggctgcggcaagactaccatcatcaacctgctgatgcgtttttacgacgtggattccggagctatcaaggtggagggaaccgacatccgcgatgtgaccagggagagcctgcggaccagctacggcatggtgctgcaggacacatggcttaaatcaggcaccatccgggacaatatagcctacggccatccaaatgccactgaggaagagattatccaggcagcaaaacaggcccatgcccatggatttatcatgcggatgccggatggatacgccactgttatcagtgaggacggagggaacctgtcccagggacagaaacagcttctctgtattgccagggttatgctgtgccttcctcccatgctcatactggacgaggccacatcttccattgacaccaggacagagattaaggtgcagaaggcctttgcgcagatgatggagggcagaaccagcttcatagtggcccacagattgtccaccatccgggaggcagacgtgattctggtcatgcgggacggtaaaattgtggaaaagggtaagcatgaggagcttctggggatgcatggtttttacgcggatatttacaatgcgcagtttgccagaggataggacgcaggtaattatgtaagagaagggggcgggcatatgggagacggacagatgatgtctgaattgtatcaggagaatatgaagcggcagaacaaaaacaggaggaggaaggatgtggcggccttcctctgcatcctgttgggaagcctgattgtagctgtcaacatgaatacctttgtggagcagggagagctggtgccgggaggctttaccggactggccaagctgatccagagaatcggactcagtttttatgatgtccagatatcatttacattactgaatgtactttttaatgcagttccggccgtgttcgcataccggctggtgggtaagaaatttacaatcctgtcctgtatctgcctgctgaccgtgtcaatcctggtggatgagctgcctgtggttcccatcaccggggatatcctgctgatatcagtcttcggaggcatcataaacggcctggggatgagcctggttctcaacagcagggcctgcggcggcggaacggactttatcgccatgtctctgtcggcaaaatacaaggtatccaccttcaactacatgcttttgttcagtgcggtcatcatactgatatcgggaactattttcggaatggataaggcgctgtactccattatttttcagttctgcaatacccaggttatcaataccttttataagaaatataagaaaaagacgcttcttattgtgacagataacccggcggccgtgtccgcggacctgctggagctgaccaaccacagcagcacgattttaaagggcttcggctcctactcagccaataaaaaatacctgatttataccgtgctctcggacagtgatgtgagaaaaatgaagaagcggatacgggaacagtacccggatacatttgtaaacgttatcaattccagcgatgtggtggggaatttttacatacagcccctggagtgatccgcccttttgggcgggtctgcatcttaatggaatctttagctgacatttccccaatctttatgtataatagtctttgaaacaaatcaatctatgtaatatgaaggaggaatcatttaccatggaatctgaccctgaagcggccaatattttattccaaatcacaatcttagttattctgacattaatcaatgcattctttgcaggctccgagatggcagtggtatctgttaacaagaacaagatacaccgcctgtccgagcagggaaacaaaaacgcagcgctcatagagcgcctgatgaaggactcaacggtgttcctgtccaccatccaggtggccatcactctggcaggctttttctccagtgcatcggcggctaccggtattgcccaggtgctggcggtacggatggcgcagtggaacctgccctacagccagaccctggcaggcgttgtggtgaccatcatcctggcttattttaacctggtgtttggtgagctggtgcccaagcggattgccctgcagaaagcggaggccttcagcctgttctgcgtacgtcccatttattatatatcacgtatcatgaatccctttataaaactgctctctctgtccaccagcggctttctgaagctgatcggcatgcacaatgaaaacctggagacagatgtgtccgaggaagaaatcaagtccatgctggaaaccggaagcgaggcaggtgtgtttaatgacattgagaaggagatgataacgtccatattttcctttgacgacaagaaggccaaggaagtgatggtgcccagacaggatatggtggcgctggatatcaatgagccgctggaagaatttctggatgagattctggaatccatgcactccaagattcctgtatacgaaggggagattgacaacatcataggcgttctgtccacaaaggcactgaccattgaggccagaaggacttcctttgacaagctggatgtccgcacccttttaaagccggcctattttgtgccggagaaccgcaggaccgacgccctgttccgggagatgcaggcaaataaaatcaaactggccattctgatcgacgaatacggcggcgtgtccggtatggtgactctggaggatcttatcgaggaaatcgttggtgatattcatgaggaatacgaggaggaggagccggagcttacagagctggagccccataaggtctaccgggtgtcgggcggcattaccctgtttgatttgaaggaggagatgcacctgcatatggacagctcctgcgataccctgtccggatacttaatggaacagctggggtatataccgtcccgggaacagctgcccctgacagtggttacaccggaagctgattatgagatattggaagtggaagacagagtgatagaatgggtgaagctgacccttaaggagacaaagaaagaacaggaagaatgacgtacagggcatggtacaaaggagggaaagtaaatgagttttctgttggaaggcattacggcggtaacctggcagcaggcagtcatgtatgtggtgggaattatcctgatttggctggcggttaagaaggaatatgaaccatcccttcttctgcccctgggttttggcgccatactggtcaacctgccgtattccggtgtggtggaccagatggtacagggaaaggtacctgcggccggaatcatagaatggctgttcaaaaccggaattgaggcttcggaggccatgccaatcctgctttttatcggaattggcgctatgattgattttggtccattgctgagccagccggtactgttcctgttcggggcagcggcccagtttggaatttttgcagctatcctcattgcgtgtcttatgggctttgatctgagggatgccgcctccatcggcatcattggagctgcggacggacctacctccatcctggtatcccaggttctggggtccaggtacatcggccccattgcggtggccgcctattcctatatggccctggttcccattatccagccctttgccatacgtctggtgaccaccagaaaggagcgctgtattcatatggagtacaatcccaagagtgtgaataaacagctgcgaatcgcgtttcccattgccgtgaccatcatagtgggcctgatatcaccgcagtccgtggccctggtgggctttcttatgttcggaaacctgcttcgggaatgcggcgtcctgggaagcctgagccagacggcccagaacgagtttgccaatataatcacactgctcctgggcatcaccatctcgttcagcatgagagcagagcagtttgtgaacccggctacattgatgattatggttctgggactggtggcctttgtattcgacaccatcggcggcgtgctttttgccaagctgattaatgtattcctcaagatggcgggtaagaaaccggtgaaccccatgattgggggctgcggcatatccgcattccccatgtcctccagggtggtgcagaggatggctgccagggaggagccgggtaatatcatactgatgcaggctgccggcaccaatgtatcgggccaggtggcatcggttattgccggaggactggttatcagcatcgtgtcccagtatctgtagggcggaagaatcggagcttcagacaggctctggagtcagcagcaaaggaggaagcgtatgaatatggaacacgtagggattgccctggaaattatgggaaaaggtatgggcggaatctttgcggccattatcatcatcatggctgcggtaatggtattgggccgtattacgaaggaccgtaaggaccataaggacagtaaagaataggagtccgggagatgagaataaacaggaaggggagcacggctggtgtaaagcgtgttcccttttctgtttgtttgtgtcacagtaaaaataaaccacctgctctgcaggtggagggaatatcttcagataaaagcaactcctgtgctaaaatagatgtaggtctgcaaaccacaaataaaaaagcacaggaggtccaaaaatggacaataacagtttagctcatacaaaatgggattgcaagtatcatctggtttttgcaccaaaatatcggaggcaggtaatatataaggatatcaaggcagatgtaggccaaatactagggaccttatgccgaagaaaagggattgagataatcgaggcacaatgcatgccggatcatatccatatgctggtaagtattccgcccaaatatgctgtgtcagaggtagtggggtatctcaaaggaaaaagttcacttatgatattcgagaagcatgcgaacctaaaatataagtacggaaatcgtcatttctggtgccgtggatattacgtggacacagtagggaagaatacagcggccataaaggcatatatacaaaatcagataaaggaagatttggaatatgatcagatgtcgttagtagagtacattgacccgtttacgggtgagccggtgaagaaaaacaagaagtaagactcataagagtcagtagggagccaaagcaaaccagcaagcccccattggggcaaagccggagtaaggaagcgctgaatatgcccttttaagggcagctgagaatgtggtgcagttggcagacttttcagtgcgccttccgggcgcaagcaggtaacagccccttataggggcagaacaagccaccggctaagccggtggtcttgactttttggtagtggaagaactccctggccctcaatcaggggaatcagggtccctggtgacggacagacggatgcctgtgaaggtcctgcgctggatgaatccggtccggaaggtgagaaagagatgggttccgaagagagggccgatcatgggaaggccccagaggcagttgttgatgccttctacaatgctgcttaccaattccataaccatacctcgtttctccgacgccgcagttttttgtgagggatacggctctggtgttaatatcaattaatctgccgcaaaaagaactgcaaaaagaaaaaagcaagaaaatacggctttatgtgttgaaataggtacaaaacacaaaaaaatacggtttttattgataacactaaaaaatatattaaaaaatcataaacaggctgtacgcatttactgcggtggaaaaaaagaagtataataattacattacagatgtgtgcagacaggttcggaatatgcagtacgaaaattcagagtggaaacatgcctgcatacatatccggcaaggagggtatatgagaaaaagcatgtcagataactacccggcgcagccttaaggcagacagccattgtgtcgggactggaaataccggctgtcgtttttagggctgcagcgtatccatggaacaagtgatgaagatggaaggagcagccgatatgaagacagaggaattaagaaagatatggaaagccgaggaggctttggcacacatccacgggtgggatttttcacacattgacagcaggtacagggaggaaggaagcctgccctgggattacaggaaaattattctgtcccatcttggggacagggattatcttttggacatggacacagggggaggcgaattcctgctctcactgggccatccatactccagaaccagcgccacagaggcatatcctcccaatgcagagctgtgcaggaggcttctggcgcccctgggaattgatttcagggaggcgccggggaatcagacgctgccctttgcggacagctgttttgacatggtaataaaccgtcatggaaattatgatgcgggggaagtgaaccgtatcctgaaaccgggcggcattttcataacccagcaggtgggggaggacaatgacagggaattggtggagctgcttttgcccggcacgccaaaacctttcccgggaatgaatctgaaggagcagtccaaaaagcttaaggagtccgggtttgatattctggggcaaggtgaagccttccgtcccatacgcttttttgacgtaggggcgcttgtatggtttgccaaaatcattgagtgggaattccccggcttctgtgtggatggctgtctggacagactggctgccgcccagggccttttggagtccgggggctccattgaggggaccatccaccgctatatgataactgccaggaagagggaacccgtgtatttggaacccatgtattaagggaacgctcgcattaggggaacactcacattaagggaacgctcgcatcaagggaacgctcaaattaagatacggcggtttctgaccacaacttcctggcggccagggaaattaccgccatggcaatgcaggtgaaaagggcaggaaggtaaatccttgccgggaaggtctggaagataaatccgcagaccaattggcccaggggagccgcgcactgtgacactgccgtgataatggccatcacctttcccagattttcgttgggagtctccttctggacctttgtgataacgaagatggaaatgatggtcataatcatggcaatggggacagcgcaggccaggaacatcagataggacggataaaaaccgcggctgatccatgcaggggttacggacagtgccatgggaaggaacagaagggcgatggctgccagaaggcggtgcaggttttccatgcgcatctttttagcggcagcgcccatggacagggcgcctaatatagtagccagattgatggttcccatgccgattccgtacatggcgtccgtgcttttcatggctgtccttaaaatgacaggccctcccaccacaaaaaacggggtcagaatcagattcagcagggaagccagaatcatggagcgcagtatgagaggatttcggccgacataggaaaagccttcctttaagtcggccgcaatggtgggaataacgggcatggtgaattcgcgtttgcggaaaggaatatggatgaacagctccagtacagcggaacagataaatgcggttccgctgacgcacaccagggctttgaccccgaatatgccgtagaacattccgccaatcagcggggccgccacattggagagggcctggaccccgtttacaaggccgtttgctccctccagatgttcctccttcaccaaaaggggaatgctggccgtcaccgccggtccatacatggaactgatgacagagagcagtatcaggacagcgcctgtaagaaagatggaagtcccccccagacggaggcttacatagtacagagatatgattataccgctggtaaagtcgaagagcaccatcagattgcgcctgttaaaacggtcggcaacagctccgcctacaggggaaatcagaagaggaatattggagaatgcatacagagcggcgtagatgtccgcccttcccgtaatgtccagtacatagagggacagggcaaaccgcagcagggcagatcccagtatggatataatctgcccgattaccatgaggcggaaatccctgtttcccgatatgggactatttgccatcattcatccctccgtgattctgattcctgtaaaatacatccgcttcccgcggccaaaatctgtttcatgggttcaaaggttcctttttcagcgcccagtacagcttccatggcttctatgaatccgtttatcttttgttccatctcacaaggtgtccatgtaaacatagaggaatcaaacaatatctgcccggaaaccaacagtatctgcatggcttccaatggatgctctgtggagaacaggcgctccttcactccctgggaagcgatctcgcccaggatgggggagagggccagaatcgagcgcacaatgcttttttcgtgcatcagggcattggccggcagatggaactcctcaatcatcctgtctttagggccatctgtccggggctgtccggcagctatgatccggcatattttccggaccggtgatatactcttatccatggctatcagccgggccttttgtacgtcctgttcaatgaaacgttctatgatggcatccatcacctcttccttggatttaaaataataataaaaagtaccctttgcaatacctacctgattcaggatatcaataatggtggtttttgagtaccctttttctgtaataagcgtctcagcagcgtccagaatttcatttctccgttcgtcggcttccttaacaatacgtgccatggtttgccctcctatctcatagaccgaccgtcggtctatgagatatcatacatgatatgaagggcaatgtcaatgggatttgagagaaagagctgctccgggagaaatgtggaattgaaagtacggctgaaaaccttgtgttgaaaggcggcttgtttatttactccgttaccggctgccaatacgaattttaatggcagctgggttgcttcagtaaattaacggcaacagggaggtgtctggtgtatctacagactgaccgagaaaagcccgtggctgttacagcagatatacagcactccgtgaccagacctggggaaacgtacctgggctgcctgttccggatatagtttcatcaaaagcactctgtcatagacggcatatgccatgaaggtgatatagtgctgcttttccatatcatgttccagggtgatgtaataatcgccctccactgcttttgcagacacgctgtgggaaaggtccgcgggcctggctttcagggcattcaatttcctgccgcagcaggagatttccgccatgcctgtgctggatattacatttccgcagacagggcatacatagaatttgattcgtttcatatttcctccatcttttttattgggctccaaatcgcccaacagtattttttcaatattaactcctaaaatatcagaaagctcccgcagaagggatacgtcggggcatccggcgccgcgttcccatttggaaatagtcctgtcgctgatgttcatggcattggccagggccttctgggtcattcctttttctgttctcagggtataaatcagatttcctactttgctgcaatccatgtttcttcacctccttgtctatcatagcccatatgggggataaatacaacaaacgctccgtggagtctgtggaggcagcggagccggggatactgaagaggggaggatggaatgcccggttgaaggaaaggaggtgatggaagatggtgagaaggagaacgagggagaaagaaggaaaatgagggcgaaagaaggtgaaggaggaagaataaggaggaagaataaggagaaaaagaaaaaaagaaaaaagaagaaaccggcatcatccatggctgcagtgtgacggacgacgccggtttttcattgtcatatgaatagaaagcttaagatttataaaacctgtgtaaatgattttaattacagttgcaaagcaacggctgtttatacacgcctatacattaaagcggaagagcacaacatccccgtccctcatgacatattccttgccctcggaacgtaccaggcctttttccttggctgcattcatgctgccgcaggccatcaggtcgtcgtagttgactacttcggcgcggatgaatccacgttcaaagtcgctgtgaatctttccggctgcctggggtgccttggtgcccaccttgatagtccatgcacggctctcctgggggcctgctgtcaggtagctcataaggcccaggatgcggtagctggctgcaatcagtttctccagaccggactctgtaaggccaaggtcgtctaagaacatctttttctcgtcgtcatccagctcagcgatttcctgttcaatctcagcgcagataacgaatacctcacagttgttctcgccggcaaagccgcggactgcctggacatactggttgtccgcaccgtcgtttgcaaggtcatcctcagctacattggcggcaaagatgacgggtttccatgtaagaaggttcagggtattgatgaactccatggcatcatcgccgtccggctcaaagctgcgggccagctttccgtcttccaggtgggctttgatggcttttaacagctccacttcctttgccagttccttgttgttgaacgcacccttggactgcttggcaatgcggcgctccaagatttcaatgtcggagaaaatcagctccagattaatggtctcaatgtcgcggatagggtcaatgctgccgtctacgtgaatgacattggggtcgtcaaaacagcgtactacatgaacaatggcgtccacttcacggatgttggacaggaactggttgcccagaccttcacctttggaggctccctttaccagacctgcaatgtccacgaactcgatgacggcaggggtggttttttctgaattgtacatggcggtaagtttgtccaggcggacatcgggaaccggaaccacgcctacgttggggtcaatggtacagaacgggtagttggctgattccgcacctgcctttgtcaaagaattgaagagggtactcttgccgacgttggggagtcctacgatacctaatttcatatgattaccttcctatctgtatgtgatatatgatggttcaaatacgccctggctcctggcgggggcgttctgattcaattaaagctttattatcatatcataaaaagaggggaaattaaaggggaaaatgtgcgtggggggagatgggagggatggtacgcggacggggaaggggatcgggaaaatgaacgggcgggggcggggagatttggctcatggttccctcgggggctgtctctaagccggaaccggggacaaagcagggggaccgcggcaaattccggagaaatctggatgatttctcctccatgtgccaccggcttcgggccgtgtaggccctcagccgccccctgctttgcccccggttccgcctaagtgacagcacccctcggtaaaaatcgccgaatctccccgcccccgcccgctcattttccggctgctcttttgctcgtccgctgtctcatcctcccataaggagaggagtgatggccgatggatgtgaggataattgcaggtgtgaggaattttctcgcgtgaagcgtcgagggcgtttggcggagatgtaaaaaaggatgaggagaaaattcctcatttttggatgagggcggacttatgggttatttggagatgagcagagctttgaaggtgagatttttgctcggccaataggggatgaggtggaatgtggatagatataatggctggctgcggggttttaataatcctatgtgggattccttcttattatataatatattttatataacacatttgggtttggcgggggatgggatgcggggggattgataatataggcttttttggcaataatagttatgagtgtattctgtaatattgaccgtatggtgtttgggtatgttagtaatcaggcaggattttaaatttcaggatagcaggaggttattgaatatgaaagaaacaattgtcgttatcggggcgaatcatggggggacggcggttttgaatactattttggaccagtttccgggaaatcgggtggtggcttttgacaggaactctgatatcagctttctggggtgcggtatggcgctttggattggcgggcagatttccgggcctgaggggctgttctattccagtaaggaggcttttgaggaaaagggcgctgtcattcatatggagacagaggttgacagaattgattttgacggcaaggctgtgtatgccaggggaaaggacggaaagaattatgtgcaggagtatgataaattgattctggccaccgggtctgttccgctgcgccctgagattgaggggatggggctggataatgtgcagtttgtgaagctgtatcagaatgccagggatgtgattgagaagcttaaggatacttctgttaagaaggtggctgtggtgggtgccggatatatcggggtggagctggctgaggcgtttaagaggaatggccgggaggtggttttgattgacctggcggatacatgcctgtccggatattatgacagggagttttctgacaggatggcgcacaatctgcaggagcacggggtgaagctggcttttggggagaaggtggtgagactggagggcaaaagacgggtggaacgtgtggtgacggaccagggatgttatgaggcggatatggtggtattcggtattggatttaggcccaacacatcccttggacaggggagactcaggacctttggaaatggggcctttctggtggaccgcaggcaggagacaagcgtgcccggggtgtatgcggtgggggactgcgctacggtttataacaatgccatacaggctgcggattacattgccctggctaccaacgcggtgcgctccggaatcatcgcggcccataacgcgtgcggcaaggttctggaatccgtgggcgttcagggatccaacggaatcagtatatggggacttcacatgctcagcacgggaatcagcctggccagggcaaagcggatgggatacgacgctgcggcagcggattatgaggactggcagaaggcagagtttatggagaacggaaaccataaggtgaagatacgtattgtatatgacaggaaatccagaatcatactgggagcccagatgtgctcggattatgacgtatccatgggtatccacatgttctccatggcagtggaggaacaggtgaccatagataagctgaagctgtttgatctgttcttcctccctcattttaacaagccctataactatgtgaccatggctgcgctgggggctgagtaggattaatgctggtaaataccttcttgctttttatactgcttcggggtaaaatgggaaagtatatcacttaggaaggagattttctttatggaagcagttacgggagcggatttgagttttgtgaatctgggtattaccatagagcatctgcctaacagcatcactgtgtttggattcaggattgccttttacggtatcattatagggcttgggatgctggccggcatggccattgcgtgttcagacgctaagagaagagggcaggacccggatatttatttggattttgcgctttacgccattatattttccattatgggggccagggcctactatgttattttcgactgggcaaattataaggatgatttgctgcagatatttaacctcagggcaggtggactggctatttacggaggtgtcattgcggcggccctgactctcatcgtatttacgaagaaacgaaagctgtcctttttctccatggctgacagcggcgtcctgggtctgattacgggacagatgatcggcaggtgggggaatttcttcaactgcgaagcctttggcgggtatacggacaacctgtttgccatgcgaatccggaaaagcctggtgaatcctgccatgatatcccagcagcttgtggacaatgagattgtggaaaatggcattgcctatatccaggtgcatcccaccttcctgtatgaatcactttggaacctgggcgtgctggtgttcatgctgtggtacaggaagcgcaagaagtttgaaggagagatgctgtgggtgtatttccttggatacggactgggaagggtttggattgaaggactgaggacggatcagctaaagattccgggaacggggttcgccgtgtcccagcttttatcggctgcgctggtgggcgtgtcggcggcagtgattatttaccgccatcgtcacccgaaaaagggggacaaagtggaggaatccgcctagagtgtgcctgaaaatcattcccggcatctgcctgcccccacttttgggtaaacggcaggaaagtggttggggaaatcatgggattgtcccccaccaggggcattaaagactgaaaaaatcaatattttgtgtctgttgcgggactcgtcccacatatagaggcagttgcggaaaagcccgcagctgccttattttttcgcaatttttttataagatttccgtaaaaacttcttgccatttcccaaaatctgtactatgatggacatacaagtggtagaaagtggtgcaaagtggtagaagatggttgttaagtggatgaagtgggggatttcggatgtctcccacaatagtccactaccgctccggtgtacggcaggtgataagttatgttcatgggtgagtacaatcatacagtcgatgcgaagggacggcttatcgtaccttccaaattcagagagcagttaggcgatgaattcgttgttacgaagggccttgataactgcctttttgtgtatgagaattcagaatgggccgccctggaagaaaagcttcgcacactgcctctgaccaatgcagccggacgtaagttttcacgtttcctcttagcaggagctaccacctgtgaagtagacaagcagggaaggattctccttccggccgtgcttcgtgagtttgccggaatcgagaaggatgcagtactggtaggtgtgggcagccgcattgaaatatggagtaaggataaatggctggatgcaaacacctttgatgatatggaagagattgcagaacatatggaaggtttgggaatttaatggaggaatcaacatttgtacataagtccgtacttttatatgagacagtgggaagtctgaatatcaagcctggaggcttgtatgtggacggcaccctgggcggcggcggacatgcctatgaggtgtgtaagcgtttgggcagcggaaaactgattggcatagaccaggatgcggacgccatcgaggcggccgggaaaaggcttctgccgtttcaggacaaggtgaccattgtcagaagcaattacgccaatattaaggaagtactgaaggagttggaaattgagggagtggacgggatttatctggacctgggagtatcctcctatcagctggatacggcttccagaggatttacctaccgtgaggacgcgcctcttgacatgagaatggatcagaggaacgatgtcacggccgcccatatcattaatacctacagcgagatggagctgtacaggattatccgggattacggggaggataattttgcaaagaatatagcaaagcacattgtaagggcaagaggggaacaccccattgagaccaccggggagctggcggagatcataaagggggccattccggccagggtaagggcaacgggaggccatccggccaaacggacctttcaggctatccgcattgaatgcaaccatgagctggaggttttggaacagtccattgataccatgatagaccttctgaatccgggaggccgcctcagtatcattaccttccattcactggaagacaggattgtaaagagccgtttccggttaaatgagaatccctgcatctgtcctcatgattttcctgtctgcgtgtgcggccggaaaagcaaggggaaggtggtatccagaaaacccatattgccgtcagaagaagaactggaggaaaacagccgttctaaaagcgcaaagctgcgcgtctttgagcggggacagtcttagtaagaggacaagacctttttccggttatgaaaatacgaaagacagcaggcagcagaaaagaccggcccatgccggtgtccgctgccggattcagatagaagggaggataaggttatggctgcaagggcgcaggcgtcgtcaggacgcaggaatacacatagaaataccagacccgtgtacggcaatgattatgtacagggttctgccgcaccaaagctaaggccccagactgctccaaagcaggagaccaggccggggaaaccatcaggcagccagtcggtccggagtaatcaccggatccgccgcaatcaggagcgtgccatgtatatggaccttccatatgtcatcatgcttaccattgcgtctgtgtttaccttatacctctgtatcaactacctccatgtgcagtcctccatcacggccaggatgcaccatattgagcagatggaggcagagctggaacagctcagggcggagaacgacgctctggagaccagcatcaataccagcatcgacctcaacaagatatatgagattgccaccaaggagttgggaatggtgtatgccaaaaaggaccaggtgctgttatatgacaagacagaaagtgagtatgtaagacagtatgaagacatcccggaacactaaatccgggggccgtatggggaaaggcagcagcggcagcgggaacggccccagggatcaggaacaatacagaaatgaacaacggaacaatcaacggggaaagtattactatcccaagtatatacaagagaagctggcaatcaccgtcctggtgattacgctggctttatttgcattagtcatgattttgtaccggatcataaaggacaacaacgagcagtacaataaaatcgtgctctcccagcgccagcaggagtatgacagccgtgtcatcccataccggaggggagatattgtggacaggaacggcacctatctggctaccagcgagaaggtgtataacctgattattgatccgggacagatcatgtcggatccggaaaattatctggagccaaccattcaggccctggtgaccaattttggttttgatgccggggagcttcggaccctgattgaggagcggaaggagtcagcctatctcagatataataagggacgccagctcacctatgaccagagggtggcatttgaacagatggccaaagagacaaatgaagcctaccgcaagagcgataatgacgcagaggccaagaagcgggttaagggcatctggtttgaggatgagtataagcgtatatatccctacaattccctggcctgcaatgtcataggctttaccagcagtgacggaagcgtgggcaccggaggcattgagcagtattacaacagcagcctgatcggggtcaacggacgcgaatatggatacctggaccaggattccaatttgaagggcgtggtgaaaccggcttccaacggcaatacggtggtttcaaccattgatgtgaacatccagaacattgtacagaaatatattgacgagtggcagaccaatgtgggaagcaaggtgacggcggccattgtcatgaatcccaacaacggggaaatcctggctatgggaaccagcaataaattcgacctgaataatcccagggatgtatccggctatacggagcaggagctgtttgacctggggaaaaaggaggcagcggctgtgtaccggcgggaaaatgacggtgcagtcattaccgaggaccaggtgacggagcatttttccagggaagatgtgatctcctacggacagcaggtggcgtggaaccagatatggaggaatttctgcgtcagcgatacctatgaaccgggatcaccttccaagatttttaccgtggccaccggactggaggaaggggtgcttaaaggaaatgaaagctttgagtgtaccggttacctccatgtgggagattataacatcaaatgtacggcctggcgcaggggcggacacgggtggctgaacctccaggaatcactgatgcagtcctgcaatgtggccatgatgcgcattggagccatgataggaagagagcgatttaccaaatatcagggcatctttgggtttggcgacaagacggggattgaccttcccggggaggcagacaccagcggtctggtttacagcgcggacgacatcgggcctacggacctggccaccaatgcctttggacagaactacaactgtaccatggtgcagctgtccgcggcgttctgctctgttctgaacgggggttcctactatgaaccccatgtggtgaagcagattctcaatgagcaggggtccgtggtggagaaaaaggagcctgtgctggtgcgggagactgtatcccagtccacctctgatttcctgaaggaggccatgttccagaccgttgagacaggtacgggaaaggcagcccaggtcattggctatgatgtgggcggcaagacgggtacggctgagaagcagccccgaagcgccaagaattatctggtgtcctttgccggatttgcgcccattgaggatccgcaggtatttgtgtacgtggtcattgacacgcccaattatccgccgggagagcagcaggcccacagctcctatgcaagcgctgttttctccaaaatcatgacagaaatacttccttatctgaatatattccccaccaaggaccttcctgaaaatgaggcaatccaggaaagcctgccatcctcagagggcattaatgagacggtatctgagacagagggcgcagagggaacagaggagactccggctgagacagagaagcagtatgagacagatgaatacatgccgggcggagaggaaggagaaggcgcgggcagcggtgtgccggacgcagtgcccactgtggctggggacggaaacggagaagggacaggcccctcgtcccttccggtgaagacgccgccccgccaatccaatgaaagcagcactcaggcaggtcctgccggggaaagcacccaggcaacagaaccctcctcagcaggggagacggccaagccatctgagtaatcaggagaaagattcataaaatgtgacgggctccaatatattattaacaatgatggacaccggagctgctcatgtattctaatttaacgaaacacagaaagaatatagccgtcctggcactgctcatagccatcgtcatggtgagcctgtcagggcggcttggttatctcatgctgttctgttcagagcattacagcgccatggccgaggacctgcaccagagggagcgtaccattaaggcggccagggggcgtatcattgacgccaacggggtcgtcatcgctgataacaggacagtttgtaccatttccgtcatatacaatcaggtaaaggaccgggagcaggtcatacgggtactgtgcgatgaactggatctggatgaggagctggtgagaaaacgggtggagaagcgcagttccagggaaatcatcaagaccaatgtggacaaagagctgggggaccagattcgttcctaccggctggcaggggtcaaggtggatgaggactacaaacggtattatccctacgacagcctggcatccaaggtcctgggatttaccgggggagacaaccagggcatcatcggcctggaagtaaaatacgagaaatatctgaaaggaatgaacggaaagatactcaccatgtccgacgcaaagggcgtggagatagagaatgccgcagaggacaggattgaacccataccgggcaatgatcttcacatcagcctggatgtgaatatacagaaatatgcggagcagctggcttaccaggtgctggagaagaaaaatgccaagaaggtatccatcattgtcatgaatccccagaacggggagctgatggccatggtcaatgttcctgaatttaatctgaacgaccctttcaccctgaaccagaacctgcgaagccagagtctccaggagatggctgccgccaaccagggggccacaggggcgggcaaacaggagctgttaaaccagatgtggaggaatacctgcatcaatgatacctatgagcctggttccaccttcaaaatcatcacagcggcagccggcctggagtcaggtgtggtgaagctgacagaccagttttcctgtcccggattcagggtggtggaggaccggaagataaggtgccataaagtggggggacacggggccgaaacctttctgcagggcgccatgaattcctgcaacccggtgttcattgacgtggggcagcgcctgggcgtggatggctattacaagtattttacccagttcggactgaagggaaaaacggggatcgacctgcccggcgaggcagccaccatcatgcacaaaaaagagaacatgggactggtggagctggccacggtttcctttggccagtccttccagattacaccggttcagcttatcaccacggcagcgtccattgtcaacggaggaaaccgggtgacccctcattttggcgtggagaccgtcagcgccgacggtacatcggtccacaagctggattatccttccgggggaagaattctgtcggaggagaccagcgccaccatgcggtacgtgctggagcaggtggtatcggagggaagcggcaaaaaggcaaagttagagggataccgcatcggcggcaagacagccacgtcggagaagcttccgcgaagccttaaaaaatatatttcatcgtttatcggctttgcaccggctgacaatccgcaggttatggccctcattaccattgatgagccggaggggatttattacggcgggaccatagctgccccggtggtcggagatttatttaagaatatacttccttatctgggaattgaggcagtacaggaagaaactgctgtacacctttccaatccatagttgattattcccggaaaaagacgtatactaattaccaaataagacatacatatgagattgaggtgcctttatgattcatgaaaccatactagctattatcattgcatttgccatcagcgcattgctttgccccattatcatccctttcctgcacaagcttaaattcgggcagcaggtcagggacgacggaccggagagccatctgaaaaagcagggaacgcctaccatgggcggcctgattatactcagcagcatcatcattacatctgtcttttatattcccagctatcctaaaatcattcccgtgctgtttgtcacggtaggatttggcattattgggtttttggatgattatatcaagattgtgatgaagcgttccgaggggctgaagcccatgcagaagttagtgggccagttcatcatcacaggcatcttcgcctggtacctgcttaacagcggggaggtgggaacggatatgctgattccttttacgggaggttttgacggaggcagtttcctgtccctgggaatcttctttgtacccgcgctgttcttcattatgctgggaacggataacggggtgaattttaccgatggtttggacggtctctgtacaagcgttaccatactggttgccacctttcttaccattgtggccatcggtgaggacatgggcatcagccccataaccggagcagtggtgggaagcctgctgggatttttgctgttcaatgtatatccggccaaggtgttcatgggggatacaggctccctggccctgggcggttttgtggcagcctcctgttatatgatgcgcatgcccctgtttattcctgtcatagggcttatctatttagttgaggtactgtccgtcattatccaggtaacctattttaagcgcaccggcggcaagcgtatttttaaaatggcgcccatccaccaccattttgagctgtgcggatggtcggagacaagggtggtggctgtattcgccatcgtgaccgccatcctctgcatggtggcttatctggggctgtagatatcagtatcgcacgtaagagaccaaaggacggtctctaagtgctcataacgaaccgctgcactaagctcgaaaagacctcgctaagtgcagcggaatgtatcgcacgtaagagaccaaaatacggtctctaaatgctcataacgaggaggttagttgacaaatgaaccaaagtcagagagttttagtggctggaacgggaatcagcggtattgctgctgcaaagctggttctggaacggggcggagatgtggtgctttatgacggcaatgccgccttaaaggaagaagatatcaaagagaaatttgacagggatgcaaaggtgaccgtggtgctgggggaaatcaagcgttccgacctgctgggagtggagctgtgcattatcagtcccggtataccccttgacagtccttttgtggccgttgtggacgatgccaagattcctattttgggagagattgagctggcctaccagtgcggcttggggaagctggccgccatcacgggaaccaatggaaagactaccaccacagccctcacaggggagatattaaaggcccgctatgaggagacgtttgtggtgggaaatattggggatccctatacctccaaggttctggagatgactgaggattccgtgaccgttgcagaggtgtccagcttccagctggagaccatcatggatttcaggcccaatgtcagcgccattttaaacataaccccggatcatctgaaccgccacggcaccatggaaaactatatccgcatcaaggagtgcgttaccctgaaccagacaaaggaggatgcggtggtgctcaactacgacgatcctgtcctcagggagtttggccagaatccggagcttaagcccagggttatctggttctccagcagggaaatgttaaaggacggtttctgcatggacggggataacatcgtgtactgccagaacggccgtcagaccgttgtggtcaatgttcatgacatgcagcttctgggtcggcataattatgagaacgccatggcggcagcagccattgccctggagatgggagttcccatgtctgatattacaagggtcattgaggggttccatccggtggagcacagaatcgagttcgtaagggaacgcaccggagtcagatattataacgattccaagggtactaatccggatgcagccatccaggctctcagagccatgccgggccccacccttctcattgcgggcggctatgataaaaacagcgaatacgatgagtgggtatccgagtttgagggcaaggtgagatatctggtgctcataggacagaccagggataagattgcggagtgcgcaaagaagcatggttttactgaaatcatgtacgcagaagatatgcaggaggcagtgcaggtatgcgccgtatatgcggacatcggagattatgtgctgttaagccccgcctgtgccagctggggtatgtttaaaaattatgaagagcggggacgcgtctttaaggagtgcgtcatggctttgtaggaggtaaatgcgtatggcgggaaaggtgcagacggcagccggaccctccggccagatgagacgtccggccgggagcggggagcgtatggagcagcagatgccaaagaaaaagaagaaggccaagcgtttttatgattacagccttttgttctgcatcattttcctgacagctttcgggctggtaatgatttacagcgccagctcctattcagcgcagctgagcaaggcatataacggaaacggtgcatattttatgcagaggcaggcgggaatcgcggcagtgggactggtggccatgctcatcatttccaagatagattatcacatatttgcccggttctccgtgtttgcctatctcatgtcatacatacttatgattgcggtgagcctggttggccgcgaggtcaacggcaagaagcgctggctgggagtggggcctttgagcttccagcccacggagttcgtcaagatagccctgattgtgcttctggccgcggtgataaccaccatgggcatgaaaattaataaatggaaaaatatgggatatgttgtggccctgacccttcccatagcgggattggtggccatgaacaacttaagctccggcatcattgtctgcggaatcgcgtttgtcatgctgttcgtgtcatgtaaggtgaagtggccctttttctccatcggggccctgggacttaccaccctggcctttgccgggcccataggcaagttcctgacaacggtgggactgctccagccttatcagtaccggcgaatcgaggcatggctgaatccggagtccgaccctacggacaagggattccaggttctccagggactctacgccattggctctggcggactggtgggccaggggctgggagagagcatacagaagctgggctttttgcccgagtcccagaacgatatgatatttgccataatatgtgaggagctggggctgtttggggccgtgtccattatcctcatatttctgttcatgatatacaggttcatgattatagccaataatgcccctgatttgtttggggccctgctggtggtgggcgtcatgggacacattgccattcaggttatcctgaacatagcggttgtgaccaataccattcccaacacgggaatcacccttccctttatcagttacgggggaacgtcggtgctgtttctcttgatggaaatgggaatcgtcctaagcgtgtccaatcagataaaacttgaaaagtaacagcaggaataccgcacaagcgggcacgtcccggcatatgctttaagtagaaggtgttttctacggaaggcatagataccaggaggtgccccattgtctgtcattcaggtttgtggtcttactcccttaaagggagagatatccatacaaggttctaaaaacgccgtactgcccatgatggctgcggctttacttcacagaggggttacggtgctgaccaatgtcccggtcatacgggacgtggcctgtatgctggacatactggaaagcctgggctgccggtgctgccacaagggggactgtcttgtgatggatgcccgcagcgtcacagggacatccatccctgaggagtatgtcacggccatgcgttcctccatcgtggtgttaagcgccctgctgggccgcatgggagagggcagctgctgttatccgggcggatgtctcataggagccaggcccattgacctgcacctgatggcgctgagggccctgggagccgatatcagggaacgggatgggaccatagaggccagctgcaggaagaacggcggacttaagggcacggaaatccatctgtcctatccaagcgtgggggccacggaacaggctatactggcatctgtcctggcagacggggtgaccatcatccaccaggctgccagggaaccggaaatcagccagatgtgccgcttccttaataatatgggggctgttatctgcggcatgggaaccgaccatctgatggtacagggagtggccgggcttcatgacagcagcttccgggtggagggagaccggatagtggccggtacctacggggctgccgttgtggcggctggaggagaggcccttttgcgtggcatttgcccgtctgaccttaaggtgcctttggaggaattccaaaaggccggcgcggcggtggatgccgatgaaaaaaaccgccagattcggatatgcatgggaaaacgtccccttccccttcttattaaaacagagccgtatcccggttttcccacggatttgcagtcgcccttcatggcatttctggccactgcccagggaaccagttatatcgaggaacaggtattcgaaggaagatttgcaacggcaaagatcctggagcagatgggtgccgtcatacgcacggaggaccagagagctgtgattgaggggcattatcccctgaagggagctgctgtcaatgcctgcgacttaagaggcggggcagccctgatggtggcggccctggccgcggagggggatacattcatcggggaatgccatcacattgagcgggggtacgaggacatatgcagggacatggcagctttgggcgcccatatccgctgggtggggaaggactcctgacggccggaaaaagttcccgcagacgggagcggatttatggcagggaagaatgattttaccaggtgaggtacagtatgagaaattatggcagtaaacatcatataggggcaggtattgccgtggcagtggtactgctgctggcaatcctgcttttgtctgtacagattcagcatgtgacggtgacgggaagcgacaggtattccgccaaacaggtggaagagcttctgttcaccggcagatgggggaagaattcagcccacgcttatttttcggacaagttccgtccccacatccagattccctttgtggaggattataaagtggttttccacaatccgcttgacgtagaagtgatcatatatgagaagagcattgtggggtatgtgtcctacatgagcagcttcatgtattttgacaaggacggcattgtggtggagagttcgggaagccagctgcccggcgtcccgtggattacaggcatggaattcggcagaatcgtgctgcaccgcccccttcccgtggatgataagaacatttttgaggagatactgaacctgacacagcagctgtcagtctatgatattgccgtggaccgcatccagtatgattcccacggacaggccaccctgttcatcggaaagatggaggttaccatgggagatcacacggatattgacggaaagatttccacgctcaacgatattcttaaggcccagccccagcttacggaaattagcgggaccatgaagcttgacaactattcggagtccaacagcggggccgggattacatttaaaaagaagtaataaagaagtgatttgcttcggttcaatccgcttataaaaaagcattattcataatctgaatagtgcttttttctgtaaggtacaaaatataagaggttcaagggggtgcagggggtgaaaataaaataaaaattcaaaaaataatataatatattgaaattatatttcaaatacggtataataatatccaggaggtagaaaatggacaatccaaatacgagttatcagctgagagtgcaatcaatattgccttccatcaacaaaaagaatgaaatgaagatttatgaattcatagagataaacaggaaggaaatcatacatatgtctgtggcggatgcggcggaggcttgcggggtcagtgaggcagccatagtcagatatgcacagaaattagggtacaagggataccaggccatgaaaatcagcattgcccaggacgtaattgagccgggacagcagatttacggccaattgtcaaagggagataccattcctacgattgtggataagatatttgattcaaatatccagtcattaagggatacaagcgacgtgctcagcagggagaatatagatgaggcggttaatctgatattgggatgcaggcgccttttgttttttggagtgggcggttccggctgtgttgccatggacgggcagcataagtttttaaagattggttatatggccatggcatttacggacagtaatctgcaggccatggctgcgtctgtacttacatcccgggacgtcttggtggctgtttcccattccggggcatccaaggacattctcatggccatggacattgcaaaacaatccggggcaaagacaatcgctattaccaattatgggaagtcgcccattgtggaaaaggcggatgttgttctgtatacatcttccaatgagactgcctttaacagcgatgcattgtcatccagaatagcggagctgacaatcattgatatgctgtatataggagtatcttataagagatacgatgaatcatatgccaatatacttaagacgaggaaggcattggattccactaaaatataaaggaggtgaataaaaaaggaacatgaagtcaacgtatggagagaggtgataagacaaccaaagttaaatatctgagattaaggaggatagtgtatgttttgtggaattgatttggggacttccagtgtaaaggcctctgtttttgacgaacatgggagacagctggccttttccagaagagagattgatctggtacttccacagacagggttggcggagttggatccagagaattatctggtaaaggtatacgagacattacgggatgtgtcggcacaatgccatgggaatattgcatcaatcgcggtttcatcccaggcacaggcagtggtacccatagaccgtatggggaaccctctgtataacatcatcgttacaatggataacagaacgctgcggcaatacagattctggaaggaacaccatgatgagtgggagatatacaagggcaccggcaatggatttgcttccatttatacggtaaacaagattatgtggtttattgaaaacaggccggatatctatgaaaaggcatggaaattctgctgcgtccaggattatgtggtatttaagctgacaggagaaggcccgtttatagactattccatggccggaaggaccatgatgctgtcctcagagcgtccggagtgggacagcggtgtattagatattgcgggcatatcaaaggaaaaattgtcggaaccagtcagctccactgccactataggaagggtgagggaggacataagagccggatttggcctgagccggacctgccaggtggtcctgggaggacacgatcaggcctgcggcgcagttggaagcggcgtgattacgccgggcatggtgatggatgcctgcggcaccgtggacgcaatggtttcggttctgcctggctttatcatagacagggccatgctggataacaaactgccctgctacaggcatgtggacggaaccaattatattaccatggcaatcaatacaaacgggggattatttttgaaatggtacaagaataccttctgtcatgaggaatcacagttatgcggtgaacagaactgtgatatttatacatatattattaaagagtgcgccaacactccggcagacatatatgtattacctcatttggaaggcgcgggtacaccggtaaatgatccgctatctcttggagccgtaatcggcttaagagtcactcatacaaaaaaagatataacccgtgctgttttagattccctgggctatgagatgaaattaaacctctcagccattgaacagagcacaggacagtcaatcgaagagatacgcatgattggcggcggtgccaagtcgcctaaatggttacagataaaggcagatatattcaaccgcagcatcactgtgttagaaacccaggaggcagcatccctgggagcagccataacaggcgctgtagggaccggttattttgaagatttcggacaagccatccaacatatggtccatccgaaagaaacatatatccccaatcctgcaatggtaaaggagtatgaaacaagatttgaggaatataaaagaatatatccgggattaaaggatatcagtcacaggatatccagccgtacatctatatactaattctgtttcctggatttgtcaattccatttttgtattccgaatacagcgcttaaaataacttgaaatgtgagaattaaggtatcagttgaaacgggtggtacttctattaaagtacgcccaaaataggaggttatcatatgagtgggattacattagctgtgaatttggccatatcaattgcgatcatattatttttagtcctgaagtttaaaatcaaccctgttatatccatgatactggccagtctgtatatggggatatcctgcagcctgggcttcatggacaccattacatcaatcaacagcggatttggatctctgatgacgggaatcggctttcccataggatttggaatcatgatgggccagatactggaggattccggtgctgcggaatccctggcaaaatccatattaaaggcgttccccggtaagaaggcgccctgggctttggggcttacggcgtttctgttatccatccccgtcttttttgatgtaacgtttgttattctgattcccctgggcattgcggtggcgaaggaaacgaaacggcctttggcatattttgcaggggcaattgccataggaggagtcagctcccagacatttgtgccgcccaccccaaatcccctggcggctgccaccatacttgattttgatttgtcttatattattattgcaggaaccattgtgggcctggccgcagctgtattctccatgtttgtctggttcaggatgctggaccgcccgggattctgggatcccaataaggatgaaaccggtcttttggatatggacgcggctgttgtacaccgggtggatctgccgtctccatgggcggcagtcatacctatctgccttccggtactggcgattctcatcggatccttctggccagtggtaaccggaagcgacgcaccggtggttatacagtttatttcccagaaaaccatagcaatccttctgggcctgttggctgcctatatcatattgctgaaaagaatgggatggagcggactcaatgaatcagtgagtaagtccctgaagcaggcaggcgtggtgctgctgataacaggagcaggcggggcttttggggccgtgatacaggcaacaaatataggtgaggttctcatcgcaggactgacggaaggacagtcctccacgatgcttatattatgcctgacatttggaatcggagtcttgttcagagtggcgcaggggtcaggaaccgttgcttccataaccgcgatgaccatcatggcttccgtggctccgtccgcaggctgtcatccggtatatattgccctggcggccctggccggaggcaacttcataggtcatgtcaatgattccggattctgggtggtgacaaacctatcaggggccagtgtcacaggcggcttaaaaacatatacatggaataccataacccttgcaggcatggcatttatactttcattggtgggagcaaccgtactgccgatggtatgacatcttagtatgatagaaattgagaggagtatataattatggcaatgttaggaaaagaggtaaggatgagccggctggtcaatcctgaaagcaaaaagatgatggcaattactgttgaccatgcaatttcgagaggcatagcgcctatgaagggcttacagcccattcaggaaaccattgaaaaaatcgttatgggaaggccggatgccatgaccatgacaaagggaatcgcggaacactgcatgtggccctttgccggaaaggtggcccttttgatgaaggtatcaaactattccccggtatcgcctaccagggacactatattcgggtcagtggatgaggcggtgcggatgggagcggatgcggtttccatgggagccatgaccctgggggatttccagggagaacagtttgctgccatcggtagattttccgaggagtgtatggcaaagggaatgccgcttatcggtcatgtgtatcccaagggagaatcggttccggcggacaagcagacctcctgggagaatatagcatactgtgtgagaagtgcctgcgagctgggcatggatattgtgaaaacaacgtatacaggtgacccggattccatggccagggtggtgtcgtgtgttccgtcctctttccggattgtgattcagggaggcgacaaatgcaggacattggatgattacctgaccatgacaagggaagccatggactgcggggtaggaggcgtgacaatgggaagatttgtctgggaatatgaagacgtgacagccctggttattgccctgcggtatatgattcataaggggtatacggtaaagcaggcaaaggaattgctggcccagctggagcatgataagaactatgaggatttttaagacaggggagacaggatgaagattgtggtattggatggttatacagagaatccgggagatttaagctgggagggtcttgaggcgctgggaacattgactgtgtatgacaggactcccggcgacaaggtgatagagaggatcgcagatgcacaggccgtatataccaataagacgcccatcaccggtgaaaccattgagaagtgcgccaacatgaagtttatcggagtgctggcaaccggttataatgtgattgatattaaggcggcccgttctgcaaacgtagtggtttccaatataccttcctacggaacggatgcagttgcccagtatgctgtggcgcttttgctggagctttgccatcatatcggagaacattcggattgcgtgaaggccggcgggtggagccgcagcagggactggtgcttttggaagcatcccctggtggagcttgcaggcaagacatttggggtcatcggctttggacgtatcggtcagaggaccgcaaaaatagcagaggcattaggaatgaagatagtagcttatgatgaacggcctgtgaaagagctggaaggggaaaatttcagatacgtttccctggatgagcttttatccatgtcggatgtcataagcctccactgtccgctgtttccgtcaacagaaggcattatcaataaagataccattgccaaaatgaaggatggagtgaaaatcatcaatacctccagaggtcccttgattgtggagcaggatttgcggcaggccctggacagcggaaaggttagcggggcagctgtggatgtggtgtcagaggaacccatcagagaggataatcctctgctgggagccaaaaacagtattatcactccccatattgcatgggctcccagggagtccagacagcggcttatggatattgctgtctccaatttaaaggcatttatggaaggaaatccagtcaatgtggtgagttgaggatatgctgaaggcttcaggtttaaattcacaggataacgtatattaagtttaaaacaggggatggacggctgtctgtttaggagctgtccatcccctgtatttgcttttttccgcatgaaacatatattggcagacagagggctgctattaattaaggaagaaagtcaaaaaatagtcctccgccagtcaggcttttcctttttagggcggttatctgcatcttagaaaatagtggcatgaatcaggtgttgtaaagtaagctggaatttggtacaatgtcaatgagtgtttctaaaaatattaggaaatgtaaaaaaaggtgttgatattttttgtgaaatcaaatatagtattagttagaccagaaattgatgagaaattgacattgatgatagaatgaaagcatggcttgaaatggtagtaagggaataaaaggaggatatggatcttgttagagattaagataaatgagtcagagaatgccgccaggattatagtcgtaggtgtgggcggcgcaggaaataatgcagttaaccgcatgattgacgaaaacattgcaggggtggagtttattggcattaacactgataaacaggcccttcagttttgtaaagcccccactgccatgcagattggagagaagctgaccaagggactgggagcaggtgccaggcctgaggtgggagagaaagctgctgaggagagttcagaagagatttcacaggccttaaagggtgctgatatggtgtttgtcacctgcggcatgggcggcggaaccggaaccggagcagctccagtggtagccaagattgcaaaagatatggggattcttaccgtaggcgtggtgaccaagcccttccgtttcgaggccaagacgcgtatgagcaatgccctgtcaggtatcgaacagctgaagaacagtgtcgataccttaattgtgattcccaatgacaggcttcttgagattgtggacaggcgtaccaccatgccggatgcacttaagaaagcagatgaggtgcttcagcaggctgttcagggcattacggatctgattaatgttccgggtctcattaacctggattttgctgatgtccagaccgtcatgattgacaagggcattgcgcatatcggtatcggcaaggccaagggagatgataaggccattgaggcggttaagcaggctgtatccagtcctctgttagagactaccattgaaggcgccagccatgtcatcatcaatatttccggcgatatcagcctgattgaggccaatgaggctgccagctatgttcaggagctggccggtgatgaagctaacattatcttcggcgccatgtttgatgagaacgctcaggatgaggctaccatcactgtcattgccactggtttggacgagcatggagccaatgcttccgtggcaaaggccatgactggttttaccagttttaagacaaaggtaccggcagcaggagcgcccgccggacagcaggcacatgcggcagcacctgaggcagcagcaacagcgtctgcaccttataccagcagaccggcatcccagggatattcgacccacggctataatccggccggaggcagccagggatacacagcgcccaagtataacccgaaccagggatattccgcaggcggcagccagaatgccggccagaatcctacccctgctccaagccagcctttcagaccggctaccaataaggagatgcagattaatattccggatttcctgaagaataagagataagtttcaaccagatttgtatatgttccggctgccatgaggcagccggttttttgcttttagttatccctaataaaaaagaatgccgggacggtatctgctaaagtacgttccaacattcatcatagatttatttctttgttattctttgctcttttcctgcaaatccagcagcagggccaccaaatcatccactgctttttttgaccgttcattgagcctgccataggaggccatgaggtcattgccagacccagggtccggccggcatgtgttctgaacaggctctgtctccagaaggaagctgccggtagtgttcagaatccgggccagctgcttcagtttagccacatccggctgtcgtttgcctgtttcgtatccgcagtaggtgctggctgtcaggcctaaggcgtccgctacctgctgctgcgtataccccatggaaaccctggcttttttcagttgttcggaaaatcccattatcacacctcatttccgggccaacctctggttggcgtattgtcaatttgttgataaaatacattgacatactggcaattcgctgatattataaatatacatattggcaatacgccaatatataacaatacgccacaggatggcagtctactgccgcttgcccagacgcagtttcagcgctttgaccgtgtccaaaaggaatagctgttcatcctctgagagttccttggcaatatcatagagttcctccagcagttttgcgctttgaaaggcctggtttccggattccatgtctcctgtgccgtcggtgagccattctttattaatgttcagtatctggcagactgcattgatgacaatggcctgcggttctgtcttgtttttttccaggttgaagatgacacctctggatacgccgatggtctgggcaagggaatcctgggtatatcccttttgtttccgcgcatagttgagtcgttctcccaatgtattcatttttatcacccccgcaatcagtatacaatgagcaaaattcattgtcaatgattttttggccgcttaagtgcaggaaaaatatagtatgtttcattgacagtgaattccttatctgctataattcattaatagagcaaaaagaaaggagggataacattgacaatgcaaaaggaagaagaacggcagaacagggtattaatggaaatcattgacaacgcaaaggaacttccggtggaaagccagaacctgctgcttatacttgccaggggaatggtatttacgcgtaactgtatgatgcggcagaatgctgcggaccagccgcgcatgccgccggacgagcattctgcatgaatcataaaactatataatgaaaaaggagagatgaacgtatgaaaaaaagacttgtatcactgtttctggcattgaccatgacatgggggcttactgcctgcgcaggcggttcttctgccccggcatcatcagcagccccggcatcagccgctgacccggcagcatcagccgatgcggcttcggcccagggggaggcagagggttccaagacggataacacaggtacggatgccaaggccagctatacgctgaatatcggatcagccatgagctccaccaacccgtccagcattgccctgcagagctttaaaaaggcggtggaggagaggaccggcggggacctggctgtaaacatatatacggattcggccctgggcggtgaagccgaccttttggaacaggttacatccggtacggtagagggaatgatgcagatgggagcagccaactgggagccctataattcggaagtaaacgtggcccttctgccgttcctgtttacatccctggacaatgccaggcaagcctgggccggtgagttcggccagcagttctgcgaaaagcttctggagccaacaggcgtgaccattctgtctgtgtgggagtccggctaccgccatatgaccaacaacaccaggcctattctggctcctgcggatattgcgggcatcaagttccgcaccaatgaaaacagcatgaaggtcaagatgtatgaggcggttggaggatcggctgttattatggcattttccgatgtgtatacaggccttcagaacaagaccattgacggccaggaaaatcctctggcaaacatctacacctcatccctccaggatgtacagacttatttgtccctgaccggccatatgtatgacgctgctcctctggcagtcaataccgcatggtttgaaacccttccggaagagtaccagaccatactgtttgaggaggctgacaaggcaagggaagtggacctgcaggaaaatgatgagtcaaaatacctggaattattaaaagaggcaggtatggaaatcaatgaggtggataaggaagcgttccaggaggcaatgtcaggcatctgggaagagtttgcttcccagtacgaggacggacagtattggatagaccttgctacttcctttaataagtaggtatccgcaagtaccgggggacggcccggccgtgccccggttttgccacagaacaatatgaaaaaggaggtaaaaaatggtcctgaaattaatagacaaggtaaaattccttctgcgcattttaagctgcgtcacggtgtgtaccctgaccatcatcataggaatacaggtggtgaaccggtatgtgtttggaacttcatttacatgggtggaggagctggcaggcatggccatggtttacattacatatttcggcgcagccatggccaccatcaataacagcaacacgcggatagacttttttatccgcaagctccccggacctgtgtaccgcggttttgagattctggatgactgtatctgtattgcgtttctcctggtaatctgccgctatgcggcaaagctggtgggcaccaatctcaatgccctttcagcagctatgaagatacctctttccgtcaattatgtgggtgtactgagcggctgtgtactgatgattcttttttatgtgctgcgtctctggattgatgtggagaagttaaggggaagaaacatggattatgtggaggaggagctgagtcgataatgaatactggattaattgttttgtttgttgtgttgggaatctgtctgctgattggactgcctgtggctttttccatcggcatcagctgtatggccctgctgaccgtcaatggctatccgcctctggatatcgttgtccagcgcatggccagcggcgccaaatcctttaatatgatggcaatgcctatgtttatttttgccggttccctgatggtatacggcagtacgccccgcctcatgcggtttgccaacatgatgctgcggaaaatgccgggcggactgggggccacggcacttgcagcctgcggattcttcggcgcggtctcagggtccggtgtggcaagcgctgcggctatcggcaagatcataggacctgagatgctggagcagaaatacccaaggggactgaccgtgggactgattgcggccggaggaaccatggcatgcatcattcctccaagcattgtaatggtggtctatgcgtcctcctccggggcgtcggtgggagatatgttcctggccggctttgtgccgggatttatctgtatcattgccctaatcgggctcaataccttttttgccgtaaaaaggggaaacaaggagaacgttgagaaaacagattatacggcaaaggaaaggctcaggattacaggagatgccctgcttccgcttttaatgcctattttcgtgctgggcggtgtgttttcaggtatctgtaccgccacagaggcatcggtggtggctgtcatctattcctttatcctggcagtgtttgtgtaccgggaactgacgctgcgggagttttataaagtggcggcggaaagcgttgtcaccacaggcgttatcatgctgattatctcggttgccacgcctttcgggtggattatgtccatacagaatgtgcccaccctgtttgcgggctggctgctgtccattacatccagtaagtttttaatcatggcattcatattcctgcttcttttgctgctgggaaccttcatggagaccatgtgcatcattattctggtgacgcctatccttctgcccattgcccagacccttggaatgggagtggtccactatggagtttccatgctgatggcgctgatggtaggctccctgaccccgcctctttccgttaacctgtttacatcctgcagggtgctgaatgtaaagtatgacgaggcgtttccggataccctgtgggttattctgactgtgacggcctgcgccctgctcacctttgcggtgccgggaatcacggagtttctgccgtccatcttaaagtaaggagaaccgtatggatatggacaaaaagaatatgctggaacgtgtggtaaaagctgcccgcaaagcgtatatgaaaggatttgccgcgggcagcggcggcaatgtgagcatacggattcaggggcaggtgtatatatctccacgcggaatctgcctgggtgatttgacgcaggaggacatgataatgctggaggcagatggttttgcgcctcccgcagatatatcggattccggcaggcggcgtccctccaaggaggccggaatgcatctggcgtgctacaggagccgcccggacatcttgtgcctgtttcatctgcattccccctattccattgcagctgcctgccgcaggcagggaaacgggagtccggccacgggcatgcctgcctacactccgggatacgccatgcgtgtgggaaggattcctgtggttccctattaccgtcccggaagccgggaactggccgaggctgtgtctgacgcgatttgcagccgggacagccttctgctggcaaatcacggcatggtggctgcgggaaaaagcccggaggcagtgctggccgctgcggaggagattgaggagaacgcgcatcttaccatacttttgggagaccggggaattccccttgatgaagaacagacagaggcgctgtttcgggcaggaggaactgtatgatgcataaggacctgttattgggaatagacgtaggcaccaccggaacaaaatgttcggtatatgattttaacggaaaacgggtggcctctgcttaccgggaatatcctatgctccatccccggcccggatggaccgaacaggacccttcccggtggtgggacgcagtgtgctgcaacctgcagaccatatttcaaagccaggacatagataaaaacaggattgcggcggtggggaccagcagcaccaacgcagtgtttctggcggaccggcaggggcagcctttgtgcaatgccatcagcctccatgaccagagaagcggtccccaggtggaatggctgaaggagaatatcggtgaggagcggatccgcgctctggccgcaaaccgcattgccaacggctccttcagccttccggccctgcggtggctggttgagaaccggccggatttgataaagggagcacataagctgatggtgccctgcggctatgtgattcaaaagctcacaggggagtttaccatgaaccggccgcgcatgagcctgacccttatggcggatatccgcaccggccaatgggatacagagattgcagaacagacaggcctgccggcccggctgctgccgagtccctgcggttccgctgaaatcgtgggcactgtgacccaatgggcggcctccatgacaggactggctgcgggaacgccggttacaggcggcaccattgacacggtagcggccaccataggggcaggcgctgtggatgagggggatttcgccctgaccataggcagcagcggaaggctttgcagcattgcgggacagcctatggaggatccaaggctgctgaacctgtacggggcctatgacggacagtacatcattgtccagtccaccaacaatgcctgtgtgtccctgcgctggttcagggacacattcggaagggaggcagccaggcaggcccaggcagccgggtgcggtatatacccatatctggaccgtctggcggacactgccccggccggggccggaggccttatatggcttccctatctggccggggagcagagccctgtctgggatacacgggccaggggcgtgttttatggggccgggctggagacagattacccatcctttataagggctgtcctggagggagtggcattttcacagcgccactgtctggaagtggtcctggaccgggctgccagaccggatatcataccccttggcggcggcgcggccaacagccctctgtggtgccggatatttgccgatgtgctgggaattcccgtggcccggctccggtccaatgagacagagaccctgggtgatatcatcatcgctgcccaggctatgggaatccatgagattgcgccggactttggaaaggtgctggcagcggacggcgaggtgttttggcccgatgatgtccgggcttgtgtatatgacagacagtaccgggtttaccgggaactgtaccaggcgttaaagcctgtattcgcgggaggaggagagcaatgaaattatgttatcaggcagccacgcccgacgtggccatagcggattcagtgacagcgtaccaggggcctctggcaaaaacctttggggacctgggcgccctgggatacgacggggtagagctgatgaccctgaatccgggaaagctggactggagggaagtgaaggaaactgctgaggaaaacaatctgtccgtggtgctggtgtgcacaggcgagatcttcggacagctgggattgagctatacacacccccaccggtccctacgccgggaggccgtggagaggacaaaggaaatcattgattttgccggttacctgggggccaatgtcaatatagggaggatacgcgggcagtactgcagggaactggacagggaggaaaccattgaactggctcagaacgcgtttaccgagctggctgactatgcagcccctaaaaatgtggacattgccctggagacagtgaccatcatgcagaccaactttatcaataccctggcggagggagctgccatggcagaccgggtgggacggcctaatttccggctcatgatggatatttttcacctgaatctggaggaaaaggatttgtatgaggccatccgtacatacagcagttacaacattcacgtacatctggctgacaataaccggcgctatccgggccaatgcggcctggattttgagaagattctgacggtctttcgggagtgcggttatgacggcaattactgtaccgagatattccagcttccgtccatggaggaagctgccagggaatccatccggtatctgaggcccattgccgaccgggtttacggcggaaacacacactgcaatgaagcaggccggaacaaggatggcagaggacgcagccgtaaggaggggatgcagatatgagagaggaacgaaaggaaacacttcaaaagctgtgccttgtattccgcaacaagctgattgatctgctgtacagtgtccagacaggccatcccgggggatcgctgtcctgcacggagatattgacagcgctttactatgagctgatggatgtggaccccatgaacccggaaaaggaggaccgggaccatctgatactgtcaaagggtcacggggcgcccatgctttatcttgtcctggcccacaagggattctttcccctggcggagttaaagaacctgcgccagacgggaagcatgctccagggccatccctgcgtacataagacgcctggggtggagctttccaccggaccgctgggactgggattatccgcaggactgggaatggccctgggatccaggcttaaagggtatgattcctacacatatgtaatcatgggggatggggaaatacaggaaggatgcgtatgggaggcagccttgtcagcgtccaaattcaaggcggaccatctgataggtattctggacaacaacggggtacagttggacggcaccctggaggatatcatgcccatgggtgatataaaggccaaatgggaggcgttcggatggaatgtgattccctgcgacggccatgatgtggaggacatatgcagggccgtggaggaggctaaaatgacggcagacaagccatccctgatactgacaaagacagtgaagggaaagggcgtttccttcatggagggcaaaaatacctggcatggaaaagccattggagaccaggaatacgcacaggcaaaagcagaactgggaggtgaccggtaatgggagagatgacagcaatccgcgatgcctacggagcggcgcttaaagaattgggggaacaggatgtaaggatcgtgggactggaggctgatgtggcttcctccacaaaaagcggtatatttggaagtgcgtttcctgagcggtattttaatgtgggaatcagcgagttaaatatggtgtccatggcggccggacttgccaggaccggtttcattccctttgttaatacctttgccgtgttcctgaccaccagaggtgcggacccggtccagagcctcattgcctatgacagcctgaatgtaaagctgtgcggcgcttactgcggcctgtctgactcctatgacggagccagtcatcaggccataacggatatggcatttgtaagatccataccgaacatgacagtcatagccacggcagacgggacggagacaagaaaggctgtgtttgccattgcagagcatcagggaccggtttatctgcgcctgagccgtgcgccggctccggtgttttacggggacaatatgaggtttgagattggaaagggtatccgcgtcagggaggggaatgacgtgtccattatcaccacgggaacgcttctgcacaacgcaatccgggcagccctgctcctggagcaggagggcatccaggcagcggtggtggacatgcatacggtaaagcccattgaccaaaatctgattctggaatgtgcagaacagacaggagccatcgtgacagcggaggaacacagcatatacggcggcctgggcagcgcagtggcagaggtgctggcagagcactgtccggttcccatggagcggatcggcgcagtggatttcgccgagtcaggggattacggccagctcatggaaaagtacggatatggcccggaatccattgcgcaaagatgcagggccgtgatgcggcgtaagcaggataatgggacgggcaggctgcctgaaaggacactgcggccctttgatatgccctgaggcccatttgaacaggaggaataagagaatgaaagaaccaatccagaaatatttccaggtaggcaccatccagtggatgacccacccgccggtcagttatccggtgtgcgattcagtcagaaccatctgctgcgatccgtattttggggctttggagattacccatatcccggacagcgagaccagggaaagggtgaagaaaatgctggaccaatcccatctgcgggtgtgctacggcgcccagccgaacctgctggggaaggggctgaatcccaaccatctggaggagacggagcggaggaaggcggaagaagagctgacccgggcagtggacgaggcggcgtatatgggggccgggggtatcgcatttttggcaggaaagtgggaacctgattccagggaacaggcatattcccagcttttaaagacaaccagggcagtgtgcacccatgccgcaaaaaagggcatgatggtggagttagaggtatttgactatgatatggataaggcggcgctgattggtccggcgcctctggcggcccggtttgcagccgatatgggcatgacccatcataattttggcctgctggcggacttgtcccattttcccaccacctatgagacctcccgttatgtggtgaggaccctgcgcccttatatcacacatttccacataggaaacgcagtggttaaggagggctgcgaggcgtacggggatcagcaccccagattcggattcccggagagcgccaacgatacggagcagctggcagaatttttcagggtactgaaggaggaaggctttttcaatgaaaaagagccttatgtgttatctcttgaggtcaaaccctggggggacgaggacggggaaattatactggctgacacgaagcgtgtgattaaccgggcatgggcgatggtggaggactgatgaagaggattagcgccaaatggtacgctgggaaaatggaaaggatgaatcatatatgaggattgtggtattagacggatatacggaaaatccgggggatctgagctggaagggcctggaggacctgggggatctgacggtttatgacaggacgcccaaggaccgggtggtggaacgcattggccaggcagaggcggtgtatacaaataagacgcccataagtgcccggacaatagagagctgccccaacctgcggtttatcggggtattggccacaggctataatattgtggacatacgcgcagccggagatgcagggatcattgtttccaacattccttcctacggcacagatgcagtggcccagtatgccattgccctgcttctggagctgtgccaccatgtgggcttccattctgactgtgtaagggcaggcgaatggacccgctccagggactggtgtttctggaagtacccgctgacagagcttgcgggaaagaccatgggaatcatcggattcgggcgcataggaaggcgcactgctgtcattgcccaggctctgggaatgaaggtgctggcctttgaccggtatcaggataaaggtctggagacggacagctgccggtacgcagacctggaagagctgctgtccggctctgatgtaatcagcctgcactgccctctgtttcctgaaacggagaaaatcatcaaccgccgcaccattgaaaagatgaaggatggggttctgattatcaacacctccagaggacagctggtggaggaagccgacctgagggagggacttgacagcggtaagataggaggcgctgccgtggatgtggtttccgcagaacccatacaggaggataatcctcttttgggcgcggaaaatatactgattacgcctcatatcgcctgggcgcccagggaatccagacaaaggctcatggatatagcagtggaaaacctgagccggtttatgtcaggcacgcctcagaatgtggtgaatgaaccatgaaacaggttatgtgaatagaggctgttgtaaacacaggctattataagaacagcacaatcaaatagagacgcgtacagccggaacgctgccgccacaccgtgtatggatgtggcggcggcgttccggctttttgtaaaaacaccatatttagtatgaaactcgaattttgtcgataaatattgtacctgttatcggttatttcgacaacatccgcgctttgaaaccgctataatggctttcagaaagtttgccagggaggtgaggccggactgagtggtttatacagtatacatagatgtggtattcgcggtcaataccataatggacatgatggttctgaccatcttaaacagagttttatcctacaggaccacaaagcggcgtattctggccggagctgtcatcggcggtatatggtcctgtgtggtgagcctggttcccggtcttccggccgcagtggagatattgggaacgtatgtagcggtgagcagcctgatggccgtagctgcctatcacctgaaaagccttagagaggtaattaaatccgtggcaggtatctaccttgtatcggttgttcttggaggtgtgatgctggtgctctatgaacacaccagggctgggtattacgcatggcttttggtggagtccggacatggaagaaggattcccgtcatggtctggattttaatgattgcaggggcagccgcagcctgctatggattttcaggggggataaaggaattaatccgtaccatggcccacaggaaggatttatgcagggttaccatgatttacggcgaaaagaaagagacagttacagggcttatagacacgggcaaccggctgagggagcctgtgagcagccagccggtccatgtggcggcggccggtatcatgaagcagctgtgtccgtcggtaaagggtgtggtttatgtgccgtaccagtccgtgggaaccagccgcggaattctgccggccgtgtacatagaccggatggagatagagcaggagggcggcaggtacagccttgagaagcccctcattgccattacgaagcaggagctttctccctcaggggagtatcaaatcctgatacagaaaagcgactaaggaacttgaataacacacaacgtacaggaggacatttccatgattataaaagtatccataccaaaccgtttccagttaaagaccatccccagcttcaggaccgtactgatgcccaggcagggggaggtgcattatataggaggcgccgatatactgcctgcccctctggaaacagaggaagagggccggatgataagtcttttgggaagcgaggatgacaaggaggccagggcggccctgattgagcacaacctgaggctggtagtctacatagcgaagaaattcgacaacaccagcgtgggggtggaggatttaatttccatcggaaccatcggactcatcaaagccatcaatacctttaagccggataagaacatcaagctggccacctatgcttccagatgcattgagaatgagattctcatgtatctcagaagaaataataagacacgtctggaagtgtccatagatgaacctctgaatgtggattgggatggaaatgaacttctgctgtcggatattcttggaacggatgaggatgtgatttatcacgatatcgaggatgagatagaaaaaagccttctcaacaacgcaatcagccgcttaaaccccagggaacgcaaaatcgtggagctgcggtacggccttacaaacgaggacggggaggaaatgacccagaaggaagtggccgacctgctgggaatctcccagtcctatatatccagactggaaaagaaaatcatgaaacggcttaaaaaagaaattgtcagatttgaataggcatggaaagtcagcagaaagagctggcttttttgctgtcttaaggcttgtctaacagaggaaaatgcggtacattgttatcaggaatatgatttgatatacaaggctttccatatcttaaagatgcgtatggggagagccggccaagggggtaggagaggcatgtccgcagcacaggtgggagaaaggctctgtttcaggctgagtgaacaggagtataaaggattcctcagatggtataagaaagactttctgaaggaaaaggacctgggaagggtccggccggattttatgaatctgaaggaagactgctgtatcaccatggagaatgaggtgatccacatacagaccgggaatacggatatatggctgctgtattctgcgctgacagaggttcataggaaggaaggcctgattctgtttttcgggcagaaggaattctgggccataccggagcgggtcctgggaggggatctggaggcgcaggaatggttcaggtgcctgaacacaaaatgtttggagaacagggatggccgaattcccatgggggatgtggaggaagcctgccgcatgagaaccgtcccattctgctgttacaccaggagcgtggaccagatagcagacgcatgcagggcattgggcctgccttggagaaatgtgcagaagctgaggaaggcggcattgttcccgtaccggtatgcgggtttgcagctgctggcactggaagaggacggtatctgtgaatatggagaacggtccgtggtcagacatgcctatggggattttgagaaggcggtttatacgccggaatatgtttatctgatgaaaggacggggcggggcggtcatgattcccgtggagccgttagcacaaataggcggcattaagatgctgtttcagatatgcaatgagagaggaagcgggaagcctctgagcctgaagcaaaaaaaggtacatgtgccggcaggaaaatgggggacaggcagaaggttactgggtgtggccgcagctgtggcggcattgggattggcggcgtggggagcagggagtggtggaagcacagggacagcgggaagcacaggaacaacgggaagcacagagacagcggagggcagcgtacagacccggatggcaatggcagaggtgtctgaagagggaacggcggattcgggggaaaacgcaggtcagacagcggaacatggaaataaagcagcagacaaaatacaggacggtattatgattactgttcccgatgatacggtttttgaccaggtggtatcagacggaacctatgtatcatcctccctttattataaaatccggcttccgcaggaggagtggacccagcagggaaaccgtgatttcggggacatactggtctcggaatgggggagtattctggtccggggatacagggagcagccgcagttttttgcaatagcgggaatagatacccccaggacaaaggcggattacatccgaaggatggagagcggagcagctgttaaggacgattccatgccggaggtgctggagtatacatacagaagggtgaagggagacgagattgtccaaaaggagatacggtataaggctgaggagaatacaggacagatatacggtgggggtgaatacggggaagggacatatcgatatagcgtagagctcagtgtgctgggaccggagtatttttacacggtaacggtacgtctcagggaagaaacgccggaatccataggagaagccaggcaggctcttgattccttccggattttggatacgtctgcgggtatctgcaaaaagatggaggacgaggtatttcacggctattacggcaaaaactatgtcatgacaaactgtctggtccttctggaggaggacttaagcccggaggaaatcggtgactgcctggagatggtgaagaagattgacacaggcttttttggggtaaaaagcggggatgcgctggcggcccggacaaaggacagtctctggctgggcatagacagtcagagtctccaggaaaactgcaccatggagaatgccaggaaggtgtcaaaaatattcaagtcggatgtcattctctatgacgaatttgacggagatctgctgatggttgcctacagcgacaaacatcaaaagcatgtgtaccagagggcgacatcaattactaaggaaatactggaatcagagtttggatgttacggaaaagagcaggagtttcctgaggacatacttaaatatacggacctgaccagagaagaggcggaggccatatggacagacccggacgctgtattccaaatggacaaatggtatgaaatcaccagccatatgacgaagatgcctgttccggaagaattcatcggcataagggactataaagagtttaaggatggctttgaaatcatccgcagataacaggagaggcagaaaagagagtaaaacaggaatgcccggaataggccgcatccacaggctggatgtcccttccgggcatttctgttgttgttatttgagctgaaccatgttatccctgatgcggaatgtaccgaagctgcggataaagctggaaatgcggctgaaaccatactgcttcacgtcaaaggaagggtatgtctttttcagctcatcgtgtatgatgctcagattatccacatgtccgttatatcccttgatgatgcgtatgatttccttttcaatctcagtcttggagatgctggcgctcttttcctggacaaaataaccgccgtggagcttgaccacctgaaagtcgttgttgttcaggctttccaaaaaggtggagagcttggagtagccgtagttcctgacatcaaaatctgaaaagcgctttgtaaggaagttacccacctttgcaaggataatgggctggttctggctgttattttcaatgaggagcttggtgatggccttctggatttcatctatgttggtaatggtcttctggttttcgatgaccgatgtctccggtgcatcgtcagaggatatgatctccagcaatttaaacgtatcgcaggctgcacggaagggcttgggggttttctgctccccgattcccatgacaaacatccctgcctccctcaggcgctgggccagcttggtaaaatccgaatcgctggaaaccaggcagaaaccatctacatttccggaatataggatgtccattgcatcaataatcatggctgaatcagtggcgttctttccggtggtgtagctgtactgctggatgggatttacggaccagtccagaagcacattcttccagctgcgcttttcgttatctgtccagtcgccgtaaatgcgtttgtaggtggcgattcccacatccgacacttcgtccaaaatgtatttgatatacttgggggagacattgtctgcatcaatcaatactgcaaatctgcgttcattttgttccatagatatgttcactttctgttggcatatgtttcaaacaagcactaacatgaatagtttaacacatctgctgaaaggcttcaagggtcagcttaaataggacttcatacttttcagcgcatttttttcaaggcggctcacctgggcctggctgatatggatttcctgggcaacctcggtctgggtttttccttcaaagaaacgcatgtcaatgatatggcgctcccgctccggcagccgcttcatggcctccaccagagataaatcctccacccagttttcctccaggttctttttgtcactaatttggtccatcacaaaaagagggtccccgccatccgtataaaccggctcatacaggctgacaggagtctgtatggcatccagtgcataggtgatgtcttcctttgaaacacctatttcctgtgcgatttccatgagagtgggttccttggaattggttctggtaagctgctccctggcatagagggccttataggcagtatccctcagggaacggctgacccggatggaattattgtccctcagatatctgcgcacttctcccagtatcataggcactgcataagtggaaaatttgacattctgagtgatgtcaaaattgtcgatggccttgattaggccgatgcatccaatctggaacaggtcgtcgatgttttcctggctgtttgaaaagcgctggattacgctgagtaccaggcgcaggttccctttgatatactgctccctggcctccttgtcaccgtccagtattctttgaaacagttcctctttctcttcattgctcagtaaaggcagtttggcggtattgactccgcatatctcaactttgtagcccgacataatccttacctccgttataatgccatacgccctgacatgaaaaaattcagggctgtactggatgaatctgctataacgaaatgatgtacggattccagatgttttatacggtttggggggagaaaaagatttccatttttttctggtttgtgtggaatgcagggaaatgcggacacacatattatagaaaaatgaataaaataacgtaaaaataaaaaaagtgaccaattatagcttgaaataacgctttacgtaacgctttgtatgctattatgtaactatagtgaaggaaaatggcttctggttacaattcaaaatacataaataatttataaaaaacatgaaaatgtaaccaaagtgtaatcatttatgatatgatattgttaagatgaatcgtgaagcagctgcacctgattggcaggggagtttatgaaaaaggagaactattatggaaagacggagaagttccggtacaataacgaaatccatgtattacagccagaaaaggattctggcatttttgctgacagcagccatggttttcacgaatttgggcaccggtctgaatgtatcctatgccggtacggcggaccaggttacgttccagatgaaaggcgcggatttggtagctgccgtggaggaggccattgaaagcggccatgagataacggcagatgatttaggctttaccaatggcaggacggcagaatttgaaaaggtatttttcggtacgaagggtgccgtgtatgaggtatatccggagatggaaggaagcagcatggaagcggagctgcgtgtatttgtgcgccttccggaggatgccggcgatatgtatatggtaaccggggacgaggaaatcatcctgctttatgtgaataacggggaggataccatcagctgcaccacggaaattacacggatggatgacggtgtagaaaaggtcaaaaagacaaagcgcgtcaccatcaggagttatgaggatgcatttggcgatgaggaagtagatatcatatcaaagccagtccaggaggagacagaagcctccgaatctgagacatcggctgaaagcggcgccgacggcaccggggagtcaactctgccggaggaaagcgcagatggcagcggaagcggcgaaaacagtggaaacagcggccaagatgccagcgaaaacagcagtgaaagcagcggcgaaaaccaggaggaaatatcacggcctgaggacgggtctcttggttcggccggcaatacagaccacggttcagacggcaatgcagatcacagtacagctgatacagaagccgtgccgtcggacgatgctcagggaacagatactgagaaagacaatgctgccgatacaaaggcagaggtaccggaaaagaacagcgggtctggttctgatgagaagccggaaaaggatattgcggaccaggataaggacacccagaagcaggaggacagggaagaaaagtcaaataaggatgaggataagaaagaagagggcgctgtgccggcagctgccatttcccgtcatgatgccccggttgtatctgagaaagaggagggcagtccggcagattccgccgatgtaaaggaaaacgtgccggagaaggaagaagcctccaatgagaaggagactgagcccagggagaaagaggagcataaggaagtaaaggagacagaagaagcagctgagacagggaaagaaaaagagacagagacggtaaaagagacagagaagccttctgcggaagagaccagggaaccggctgccccaacaacggaagtgaatgtgccggatacagacgaagtgcagactacaaaagcggatgatgagggaagcgcacctgagagtacgcaggcagcggacagcacggccggaagcagcgagccatcttccgattcagccgaagcatcagaagcaccgtccgcagatgcctcacttccttcagagacagagcaggtgaccgttccggaacctgtgccggaggatgatactaagaaggccagcacctctgatttggctggcatggggtattgttccacagccaaggtttacaccacaagcctgaaccagttaaaggcattggaggattttgacggttataaggtgacatacaccagtttccctgaggccagtgcccggattatggaggggacaagaggcgtgaaggaaggcgaaagcctgaccttcggcgtcaagacccagttgggatatacaattgacaatgtgactgccaatgatgaggatttggaagcagactcggttacagatgagctggatggatcacagacagcatggtataccatatccgaggtttatgaggagcagaacatacaggtatacaccctggagacattggaacatcctgcttttgacaagtcagtggaggtcaatggggttacaatcaggataactgctcccgaaggagtgctgcctgccgacacgcagatacaggcagaggagataacagagcaggtggaatcagcgctgacggaaaaagtggatgctgagtctgatgacggaacagtggtcagcaccatcattgcatatgacatcaaccttatgtatgacggcgtgaaattagataacagctgggccgaggacggcagcaatcttgttacggtatcctttagcggagagcggattgagaaggccagcatggaggcggaccagattgaaattctccatctggagacgcctacccaggaggtccaggccgtatctgcaaaggcggagctggaaggcagcggggaaacagaagccgtagcccaggtgcctgtgctggatggcatttcagcagacgatattgcggttgacagcgagggacgccaggaactggatgtgagcggaagcgcgtccgttggacagattcatttccagactgaccatttctcggcatttacggctatatttaagacctcaccttatctggtgattgccaatgaattgcaggaaggcagtgaaggtgctgaaaaagtcgaatacacctataaagtcagcatcacagacagcaggaagaataagaatgagaagctctatctgctgacaggagatggtggggctgaggaatataatacaaccgctgtaacagaaggcgacaccaatacctataccttcaatctaaaacccaacggaaagatgaagatagggaatgtagggccgtcagctgaatacagggtagtccagacgatagaggatacttataacgagtttagaggggtaacggaaacagctagaacaaaaattgattggattgaaacagacattgacctcggcacggagggagagggagaaagtttcccctatggttatggttctaacaatcaatatggttcgctgatggagcgggccgccgtattaatgagagcatatacaaagtgcagggaatacgatgagactccggggagaaaagaccggtttgagcaacggcgggctttattgggaatttcgaataataacgtaaccaatgatagcattatagcgaagctgttagaagaccattatggtacttctaagtggcctttggcatcggaagaaggatttggcgatttggccggcatcgtaagtgaaagactggaaaaagacaatgtcccaaataacaagcggccaaagaatttatacctgcatatatacttcagaacagtagacagcgcagaaaatatggaaatcataccatatttaacgggaagtgacgctttgaaggactggaatgcgtacgcggcctttgacagccaggagggtatgtggtaccagtatttaaaagcatatccagttagcacaacctatatgatttccagtctgcatgcaggagggaatgtgaatacccctaaaaccatgcatatgctgatggaagaagacagcggcaactggcatgccatgtgcccgggagaagtaccggatataggagatccgattatgcagccggctgtggacggtgtcatttccaaatttggcaccgcatatcaaatagagtatacatttaaaaattattactataatagtacttccgcaggtgacggctccacagacactggctccacagacaacggttcctcaggaaatgattcctcagaaaaaccagataacgattcaaacaacggtaatggaaatgaatcgggcggagtgtccgggaacgacacagcggatacagataccccaggttcatccgccggcggcacaacgaatacgtcccaaggctctgagggttccggcagttcaggcggaggaaccaccacaacgtccggcggcacaggcagatatcaggggactgatgcccagagcgggccaggcgcgcagcagaatgtgattgaatcctcacaggttccccttgcatcccttccagcggatgcatcggcagcattcagccagtcaatggccatcatagacgatggggagataccgttagctgccataccgaagacaggtgacagggggagcagtgcccatgagttatcgttcattctttcggggatgctgatggccgtatatttggtccttggaaagaaaaagaaggaatcctaaaattgcaacggaaaattgagaaaattatataaggacgctgtcttatgatggagtttcaggctcagatttcatgcctgaatcacacatcataggacagcgtcctttgctgtttatggatatgaagttcccgtgcaggtcatatgatgtcatctatccatggtcacaagggtccagcggttattctgacgcatgatgaaacatggtttttttactcggtatctgtaataggcttccgccagtgtctggataatcctgtatttcattatggtggtacagattggatagatcgtcatattatgtaagtgctcctttcaagggtgatattatattttattcggcatgtcctgaaatatgactgctgatttggagggctggtgcgtcttggtgtctttatgcgggacggaacacgctatttcttctattgatatacgaaatgaaatacatgtgcccattccctttttgctgagtatcttaagtccggcgcattccccatagcgcatgatgaggcggctgtttacgttggtaaggccgatattctcgctgcccggattggctatcttttcatacagtttttggatatctgctttttccatgcccaccccggagtcaatgacagaaaaaatcaggtgtccgccccttctcacaatgcgcagcttgataaagcctgagccttccaggggcttgatgccgtggtacaggctgttttcaatcagaggctggagaatcaggcgcatgatggggatgctctccagctccttttcgtattcataatagaggatgtatttatcctcatagcggtaccgctgaatactgtcgtattttttcagataatcaatttcatcctttagggtcaccatggaatgaggattctggagggaatatttaaggatatcggacagtgcctcaatcatctggtttaccgcggtgggcttatgtgtatattccattgccttgaaatccagggtctgcagggtgttgaacaaaaaatggggattaatctgcagctgaagggctgtcatctcagccagcttctgttcctgctccttcagagccagctggctgcgaaggaaggtctggttcagaaagagctgaaccaggttgttaaggattatatcgtattcatctttgatgaacgcgggctttttagggttaaatacaccacgctccgcatccgagaacacttcaacgaaataatcaatctgttgaaaattctttttggtaatggtataagcaatccacagggaggtggaaatcactgctgccaggaccatcagaaactgcagcagcagggtgtaaagggcctgatagtagttggagtggctgatgcaggctgcgatataagtcccgcagtcagccggaatgattctcacatagtattttccacggcttaagtctacccacccgcggtaggcgtcgtccggtgactgttccaagcggctgaccaataaatccttatcctccggggacagctgggcggtttgggcgcctccctggagcaggaaattcccgtccttatccagaataaagaaccggtccagctgggaactggtattgataagctgttttaactgttcctcatatatgtttaccataaccacgcccttaaacatgctcagctttttaaagtaggtaaggacagggactggctgcgtgtaggagtactggtgcatttccctgcgttccagccattcgtcctcatcagagtggtcataggaatccttccagctcaggtctgaaaactgtgacagccgtgtagtccctcctgtgtcagaggtgagaatggaatcatacccatccaggtaatagtacacagaggcaatatagggtgcgttgttggtcagtgaattaaagttggaaaggatggtgttagtcagaattacgtccagatagccaatctgcttatgggagataaatccccgcagggagatggacagcctgggattcctggccaggatatcgtactgggtggcggcgctgtccaggaccagggagtagttatcccttacagcctgggctgctgtctcggcgtcctcacggatttcacgctgtttaccctgaaagacaaaggccaggaataccaggaatacggtgaggatgggtatggctatgatggctgaataatataaaaagctttttatgaaatttcgttttctcatggttttcagttccttcttggggtgttccgggtagggaaagccagaccacatcatagctgcggttcaggacggccgccgcaattgcggtactgggtgggcgtcatattgaaatactggtggaatgcccgggaaaaatttttgggattgtcatagcctacccggtaggcaatctcatattgcttgtaaccgatatccctcagcatgcgggccgcattttccatccgggtctttaacagataatcggagaagctggtatccgagtgctccttcatgattttggacaggtaattagggcttaaggacaccagtctggcagcctgttccagggtagcgtcctggtagctggtgtccagatagttttttaccgtactgataattttttcatagtagctcaggctttcacagacctccggcatgtcctggccctgttcactgtccagcagttcctttacccgggtcaggcagtctgccaggtcctcatattttactggttttaacaggtaatcaaagacgccgttgcgcagggctttccgcacataatcaaaatcctggtaaccgctgaaaaaaatgatttttacttttttacgggacagcaggcgttccgacagctccagtccgtccatgagaggcatacggatgtcggagagaatcaggtctaccgggcttgacagggcaaagtcataggcatccctgccgttggaaaatgagccggtaatctcaaaacccagctggttccatggaaagagattggccagtccgctccgtatcttggcttcgtcgtctgcaatgattacttggtacataggtgggcccctttcttgaaaaatactgcctttattatatataaaagagagaaaaaaatcatctgaaaactggatccgggacaaaggattcccaataatgaataaatattgtaaaaaatgatactttctccggtatttgattaaggaaagataccattttcgtaagtaaggtttcttaacaagacggcaaaagtacagtacaatagggacagttgaaaaatgggaggtaattagtaatgagaaaagcaagacaaataacaggccttttgatggctggtattatggcttccgccgtattggccggatgtaccaatgaaccggctccttcatccacatcccaggctgaagccgggaaggacagtgcagcaggcagcggcgcaccggccgcctcaggcgaccagattacgctccgctttatgtggtggggcggagatgagagaaatgaggcaactctggctgtcatcgaccagtatcagaagctgcatcctgaggtacggattgaggcggaaatgaattctgaccagggatatattgacaaggtatccaccatgctggccaacggcacggctccggacatccttcagcagaacgtggactctctgcctgactttgtgtccagaggagacttttttgtagatttctacgagtacaaggatacgtttgacacctccggctttgacgagacattcatcagccagttcggcacctttgacggaaagcttctggccctgcctaccggtatgtcatgtctggcaaccgtggccaataaaaatgcggctgaaacctgcggcgtggacctgacaaagcagatcacatgggattccatgctggaggacggaaagaagcttcacgcggagaatccggattattattacctgaatactgacaccaagatactctgcgagtacgtgctcaggccgtatctgcgtcagatgacaggagaatcctttattattgacagtgaaaagaagatgagctttaccagggaacagctggtagaagtgcttacatacatcaaggactgctatgacggaggcgtctttgaaccggcggaggacagcgccacctttaagggacagattcacaccaatccaaagtggatggatggaaaatttgtatttgcctacggcccttcctccagcatcaacctgctgatggacgctgttccggaagcagagtgtaccgttgtacagatgccgatggcagaagacagggtcaatgacggtttctttgcggataccccacagtatatgacagtaaataagaactctgaacatgtggaggaagcagtggatttcctgaactatttctacaacaatgcagaggcacaggagacgcttaaggacgtacgatccattcctcccacatccacggcaagacagctgtgtgcggataagggactcttaaaccagaccgtggtggatgcagtggatttggcagcagggcttaacggcaagagtgataagggatataccaccagcgcagaggtttatgcaattcaggaagacatgatagagagtattgcctatggacagagcactcctgaagaggcggccgacaatgccattgaactgattaatgactatctgagcggcctgaactaaaaggcttctcagcaaacaggctccaaaacaaacataaaagagattagcaggcggcccggacatcctttcccgggccgcttggaggataggaggaaataggatggaaaaggcaaagccaaggcacggcggctggaccaaacgcaacaggattggattcatgtatgtgtgtatctggatattcggttttctggtgttccagctgtacccctttatcagttcgctgctgtattcatttacaaactatgatatattccatgcgccggaatttgtgggccttgataattatgtgaagctgtttacaaaggacagggaattttggaattcaatggcagttacactgaagtataccttcatcacagtgccgggcaaggtggtgctggcccttattattgctgtgattctgaaccggaacctgaaaggaatcaactttatacgaaccgtatactacataccgtccctgctcagcggctctgttgcagtggcaatcctgtggaaggtactgtttatgaatgatggtttcatcaacagtcttctgggtctggtccacatcggcccggtcaaatggctgggaaccccggatatggcagtaatcaccatctgtatgttggaaatatggcagttcggttcctccatggtgctgtttttatccgcccttaagcaggtgccccagtccctgtatgaagcggccaggattgacggggcatcaaaacccaggatgtttttcaagataacactgcccatgattacatccattgcgtttttcaacatcattatgcagcttatcacagcccttcaaaactttacatccgcatttgtggtaacgaacggcggtcccaataaggctacctatgtgctgggtatgaagctgtatacggatgcatttaaatactttaagatgggatatgcctgcgctacctcatggattctgttcatggttatcctggtcatgaccattatcctgtttgtgacctcgaagaaatgggtttattacgataattaggaggacggcatgaaagagaaaaagattaaaaacggtattacctatgttattctcggaatcgtgggtgtggtgatgctgtttcctgtcatatggatgttctttgcctgctttaaaaccaataacgagatattcggcagcctgagccttcttccccagggatggagccctgaggcattcatcaagggatggaagaccacgggaacctacacatatgcccagtatttcataaacacctttgcgctggtggttcccaccacgctgcttaccctggtgtcctgctccatcgtggcttacggttttgccaggtttgatttccccggcaaccagtttctttttatggtgctaatagccacgctgatgcttcccaatgccatcatcatcattcccagatacgcgctgttcaacaagctgggctggctggactcctatatgaccttttacgcgccagctgccgtgggatgctaccccttctttgtgttcatgatggtgcagttcttaaggggacttccaagggatctggatgaatctgcctgcattgacggctgcggcccgttccagtgttttatacagattctgctgcccttacttaagccggctctgttttccgcgggcctgttccagtttttatggacctggaatgactttttcaacaccaacatttacattaacacggtttcaaaatttccgctgtcgctggccctcagggtgagtattgacgtgacatccaatatacagtggaaccaggttatgtccatggcgctggtgtccgtgattccgctgattctgctgttctttgcagcccagaaatattttgtggagggcattgcaacttccggcctgaagggatgattgggtgaaggtgtaataacatgtattgaggggagacgaggggaacatggaatttggcagcaccatactccacaatgtggaaagcctgattcgggatgaagaggcaggagattacctgctctgccgggtgccggaacccaccaggctggggcttaatatgaaagcgcagaaaaatatactttttgccagcaacagtgagattcggttcgtgatgaagggagacagtgccgtcttgggactcaggcgtatgccggctaaaggcgacatccgttcccagggggttctggaggtgtttcagggggattaccagggaagctacgaaataagcccctggtccgtaacggcagacagaactgaaattacaatccgcaggcaggactggtctgccatccaaaggtttgccggtaacggttattcctttcatccttcagtgaccagaattctgcttccttatgactggggatgttgtctcgggaacataaagggggatatccgtcctccaaagaaacaggagatgcccggaaagcgcctgctggtttacggttcttctattacccacggtgggaacgcgtcagtgccctccggtacatacgcgttcagactggcccggaaattgggatatgatttgattaatctggggtgcgcgggaagctgccagatggatgaggccatggcctcatatatagggtccagggacgactgggacatggcgctttttgagctgggggtcaatgtgatcgaaacatgggatggggaccggctctatggcaaagcccttgcattcctggccgctgtgctggaagccaggccggataaacaggtatttgtgacagacatgtattataaccgctatgattttgaaggggacaaaagggcggcacggtttcgcggcgccatacagcgctgcgcggcagttctttccgggcagtatgggggcaggcttcattatataaatgggcttgaggccatggatactcctcaggggctgtcgtcggacggcctacatccatcggaccaggggcatgggatgatagcagaaaggctggccggatatatggcagaaaaaaaggaggttaattgaaaatatgagaacgtacaaaaacccgattctgtatgcggattattccgacccggatgtggtgcgggtgggggaggattattatatggtatcctcctcctttacctatattccgggggttccgcttttacattccagagatctggttcactgggagctgattaaccactgcgtgaagaagctcccctttgagaaatacgcccttccatgccacggttccggcacatgggccccatccatccgctatcatgagggaacgttctttgtgtttatccctctggtggacgagggaatcctggtggccagatccaaggatccctacggggaatttgaatggaatatgctgtgtgaatcaaagggatggattgacccctgccctttctgggatgatgacggcagggcttacatggtttttgcctatgcaaagagccgctccggtataaaacaccggctgtcgctggtggaaatagatccccagtgccgctccctgctgacagagcccaggcttatatttgacggtgaacagattgcgcccacatcagaaggccccaagatgtacaaaaggaatgggtattactacattctgatgccctcaggaggcgtggagaccggatggcagtcatgcctcagatccaggtctgtctatgggccctacgactatagggtggtgatgcaccaggggaattcccgggtaaacggcccccaccagggaggatgggtaacttcgcccgatggaagggactggttcgtccatttccaggatgtggtggagctggggagaatcatccacctgcagcccatgtgttttctggatgactggccgttcattggccaggaccagaatggggacggtattggagagccggttagggagtggtccgttccggcaggagaacgtactacgggagaacgtgcggcgggagaaaaccccgcaggagatatgccggaatatgccatccgccagtctgatgattttgaggaaaagacactggggctacagtggcagtggcaggccaatcccgatgctggattttattccctgagggaaaatccgggacacctgcggctgtattgctaccggaatccgggcagggaaaacctgctctggtatgcgcccaatgtgctgacccagattccgcagaaacagaagctgtccatgaccgtgaagctgtctctttccggaagggaggacggtgattttggaggaatcggcatggtaggccatgattacggatatgcaggcctgtaccgcatgggaaagggaatccagataagatgttaccggggaacggtcacacaacccatgtttgagggggaagccggtgagaagctggtcttttcacaggaagcagatagagaacaggcctggttcagactggtgctggaggaagataagacatatggtttttcctattcgtttgacggcagaaactttacccggatagaatattcatttcccctgaaacgtgccacatggaccggtgcaaaactctgcctgtggtcctgctcacgggaaaaccaggagtctgatgggtattgcgattatgagtatgtggaaataaaataaaaaccagggctgtccgcgtaagacagccctggttcagttcgcctgccaagggcgggcgctgacgggtgccggaatctgttctaatgaacttccgtattcttccgatataaaatcagcagtcctttcaggagcagcgcatcgtccaccactatcttatggcggcacaggggagtgatgaacttggccagcccgcccgtggcgatgatggtgggaggctctcccagctccttttccatgcggtccagaatcccgtcgatcatgtcaacgttgccgtaaatgatgccggagcgcatacagtcaatggtattttttccaatgacatggctgggaacctccaggctgatgtagggcagctgggccgtcttgctgctgagtgagttaagggagaccttgaggccgggaaggatgacaccgccgatataatttccttttttgtccacggtacacagagtagtggccgtgcccatatctatgaccaccaggggaaggggatgttcatggctggctgccaccgcgtccacaatctggtcgcttccgaccgtcttggggttgtccataatgatattcatgccggttttcatgccggaccccaccagcaggggacggataccggtcaccttttccactgcgttcaggatggtggaattaacagggggaaccacggaagagagaatggctccttctatgcttgctatatcaatctgatgcatctccaggatgttcttaaagctcaccgcgtactctgtatccgtgcgtccctggtccgttgtgacccgctctatgaaatatgtttttgtctcgtctatgccgccgatgacggtgttggtattgcccatgtcgattgctaaaatcattgggggaactcctttcaatcatataggatgtatgttatactttaacatggattgtaacatagaaaaagaggaaagacaaccggaggaatcatatgttaaaaggaaagacagtccttcttggagtgacaggaagcattgcagcttataagacagccagcctggccagcatgctggttaaaaagggcgtgaaggtccatgtactgatgacaaagaacgccgctcacttcattaatcccataacctttgagagcctgacaggcaacaaatgcctggtggatacatttgacaggaattttgaattcagcgtggagcatgtggccctggcaaagcaggcggacgtggtgatgattgctcccgcgtcggcaaatgtcatcggaaagattgcccacggcattgcagatgacatgctgaccaccacggtcatggcgtgcaggtgtaaaaaaatactggccccggctatgaacaccaatatgtacgagaatccgattttacaggacaatcttgatatctgcaggcattatggcatggaagttattacaccggcctggggatatctggcctgcggtgacaccggagccggaaagatgccggagccggaggtactctacgaatatatactgcgggaggctggttatccaggagacctggcaggcaggcggattcttgtgacagccggccccaccagggagtccattgacccggtgcgctacatcacaaaccactccaccggcaagatggggtatgccattgccagggtggcagcctacaggggagctgatgttaccctggtaagcggccctgtggacctgccacgtcccctgttcgtggagactgttccggtggagagcgccagggagatgttcgaggcggttaccgcaaggagcggggagcaggacatcattgtcaaggcagcggcggtggcggattaccggcctgccacggtgggaacagaaaaaatcaagaaatccgacagtgatttatccattgccctggagcggaccaacgacatcctgggatggctggggcagaaccggagggacggacagttcctctgcggattttccatggagacccagaatatgctggagaattccagggccaagctggcaaaaaagcatattgacatgattgtagccaacaacctgaaggtggaaggcgctggattcggtacggataccaatgtggtgacgcttatcacaagggacagcgagacagaacttcccatcatgaccaaggaagaggtagctgactgcctgctgactgagattttaaaaaggacaaaagaacaggacggaattcagggataaagccgcggacgggccggcagatacctataaaaaccatagtattcaaatagcagaataggcggtacagacagataatgaggattgaatcccgtatgacacgggggtcagtcctttttctgtttccagtttgtccccatacgatgccggaaaacatactgataatgtcttaacaaagttgttgtgaaatgtatctaaaaaaacgcggaattcacggcgtatgacctgctcatattgtgagtttagactaaaatggcgaaacaaaaatttgaatattgactttggaaccagcagaatatataattaaattatatttgaaacgggtttcaagtataaaacatacaaagagcggaagagccggaaggcatataatccgcagacaggcaggatgatgggcttatgacgggcatacgcgatgtggcaaaactggcgggagtatccccctcaaccgtatccagggtaatgaacggtacggccagggtggatgatgagaagagacagaaggtggaacgggccatattagaaaccggtttcaaaccaaatgaggtggccaggtccctttacaagcgttcgtccaaaatcatcggcatactggtgccgaacatcatcaatccgttttttaatgagctggcaggagctgtggaggaggaatgtgaccgcaggggataccgcctgacgctctgcaactccaatgatgatttggaaaaggagaagcggaacctgagtctgttggaacggatgaatgcagacggagttatcctaatgaccaacatggatgagatacataaggaagtgggaaactgccggattccggtagtgatgattgaccggcagattgaggggggcaaggaaattgcctgtatccagtccaaccattaccagggcgggcggatgtccgtggagcacctgctggaatgcgggtgcaggcacatcgtacagatgagcggtcccctttatctttccagcgccagaaagcgccaccaggggtacctggatgtgtgcagggaacggggaatcgagcctgcctggatagagggagattacagctttgagtcgggaaccgagatggcggcgcggctgctggagcagtatccggatacggacggaatcattgcggccaacgatatggtggccatatcggtttataaggagcttcacaggaaaggcataagggtgccggaggatatgcagttaatcgggtttgacaacatttccctcagcagcctgtttacgccggagattaccaccattgcccagcccatcaaaaggatggggcaggaggcagttcgaatgctgaccgaatatgttgccggggcgcagattagccggaataaggtattcgatgtcaagctgataaaaagggacacaactctttagggaatggccgtagcgcagtaccaggccatttccgggcatcaaagggataaactgtaaccataaaataaaatgtaaagcagaaaaggaggaattatgaagacagcagtggtaggcagcatcaacatggacatgacagtgacagcagagaggattcccttaaagggggaaacactgaagggagaggacatccgctacatacccggaggaaagggcgccaaccaggccgttgccatggcaaagctgggagcagatgtggagatgttcggctgtgtgggcggcgatgaggcgggaagaagcctcataaagaacatggaagacatgggagtgggaaccacccacatcaaagtggctcccggagtgaacacaggattggcggtcatcactgtgggggatcatgacaacactatcgtggtggtggcaggagccaatgacaaggtggaccgggaatatgtggacagcataagggatgctctgctggcatgtgatatcgtattgttgcagcatgagataccccaggataccatcgagtatgtaattgatatctgccatgaaaatggggtcaaggtagtgctgaatccaggaccggccagaccggtgaagccggaagtcctggcaaaggtggattaccttacgccaaatgaacatgaggcagccatcctgttcggggatatgcccgtggaggagatgctgagggcacatcccggcaagctggtgattacccagggttccagaggcgtatccacatgccttccaacgggagaaatacttaccgtaccagccaggaaagccaatgtggtggataccacaggagcaggggatacactaaacggtgcatttaccgtagagattgcggggggcagcaccatggaggaagcgctccggtttgccaacacggcagccagcctgtccactgagcggttcggagcccagggcggaatgcctgtgcgcagccaggtactggaagccatgaatcaggagaacatgtaaagcattgacaaatacgctttcggcgtaaagaagacggaggaacaaaaacatgaagagacacggcatactcaacagcaatatttccagggtactgtcatccatggggcatacggacagaattgcaatcgctgactgcggactgcctgtaccggaggggacagagcgcattgatttggctgtgacatttggaaatccccggtttatggacgtcttgaaagcggtttcaagtgatatgaaaatagaagcagtggttctggcagaggaaatcaaagaacagaatccacaaatcctggaagaaatccaggagctttttgccagctttgaaaccggtttcaaaccggaaaaggtggaatttgtcccgcatacacgctttaaggagatgacaaaggaatgcagggccgttatcaggacaggagagacaacgccctatgccaacatcatcctgcagtccggctgtatcttttaaagcagaatttatctggagggaaacaacatgaaaattgaaatgaaaggaatcaacaaatcctttgggcagaaccaggtcctaaaggacgccggctttgtgctggacgacggggaagtacacgccctgatgggagaaaacggcgcaggcaagtccacgctgatgaaaattctgaccggcgtctacacccgcgacgggggcaccgtcatagtggacggaaaagaagtgacctacaaaagtccccaggaagcggaacgggcaggtattgtctttatccagcaggagctgaacgtgctgtttgacctgacggtggaagaaaaccttttcctgggaaaggaaatcaaaaagggatttggaatatgcgaccggaaggccatgagggcaaaggccgaggaaaccttaaaacgtctgggagtcagcattcccacggacaaggtgatgtctgagctctccgtgggacagcagcagatgatagaaatttgtaaggccctgatggtggacgcaaaagtcatcatcatggatgaacccacggcagcccttacccagagcgagacagaggtgctgtttgaggtcatgcagtccctgcgaaaaaagggagtgtccatcgtctatatatcccaccgcatggaggaaatctttgagctttgcgaccgcatttccgttctcagggacggcacatacataggcacaaagaagattccggaaaccaatatgaatgaaatcgtcaaaatgatgattggccgtgaaatcggcgagcggtatcccaaacgtgactgcgccattggagacgaggtattccgggtggagggcctcacaaaggagggggtgttccgcgatgtggatttctcggtaaaggctggcgaggtgctgggggtatccgggctgatgggagcggggcgcacggaaatcatgcaggctattttcggaaacctgccctacgacagaggcagcatttttatcaacggaaagcaggcggtgattaagaatcccctgcaggccattgaacatggaatcggcttcataacagaggaccgcaagacagagggacttctgctggaggagagcattgagaaaaatgtatccctgaccaatcaggggcgtatctctggcaagagcaaggtggtaatcagcagggagaaggaaaaagggctggtcacaaaggccatagaggagcttcatatcaggtgcttcgggccaggacatgagtgtgtgaacttaagcggcggcaaccagcagaaggtggtattcgcaaaatggatttacacagaacccagaatactgattctggatgagcccacaagaggcgtggacataggcgccaagaaggaaatatacagcattataaaccagctggcaaaaaagggggttgccatcatcatggtgtcctctgaactgccggaggtattgggaatgagcgaccggattatggtggtgcgggaaggtttggtcaggggaatcatcggccaggctgaggctgaccaggagaagataatgacattggctacgggaggtaccttatcatgaatgaaaataagaataaagtcatcaattacgcccaggattttggagcgctcatcgcccttatcctgctggtggcaggcatcagcattgccagcccaagtttccgcaccggggccaatttcctgtccctgctgcgccagtcttccattaacggactcattgccttcggcatgacctttgtcatactgacggacgccattgacttgtccgtgggctcggtgctggccctcagcacggctctgtgcgccggaatgatttcggcaggggttccggctgggctggccatgattctggcactggtcctgggctgcgccatgggcgttatcagcggcgtcatggtcaccaagggacgtctgcagccatttatcgcaaccctcattaccatgacggtataccgcggcctgaccatgatatacaccaacggaaagccaatctccaacctgggagacagcttcatcctgaaggtggttggaaaggggaagttctacggcgttccgattccggtcatccttttgatactcctgttcctgctcttttatttcctgttaaataagaccaccttcggacgcaggatttacgccaccggaagcaactggaaatccgccaagctggctggcgtaaacatacacaggacaaagatcatcgcctatgccatatccggcaccatggcggcattatccggactgattctgctatccagactgggctccgcacagcctacccttggaaacggctatgagctggacgccattgccgcagtggccctgggaggcaccagcatgagtggcggcaggggaaaaatctacggaaccctgattggcgtactgattatcgcggtgctgaacaacggccttaacatccttggcgtatcttcctactatcaggacgtaatcaagggtctggtcatcctgattgccgtactctcagaccgcaagagataggaaaacagtacacagcacacagaaatctgatatgaaattaagaatatgaattttgggagggaaagaccgtgaagattaagaaaatactggcacttatggcagcaggcacaatgcttatgacaatgggaggctgcaacgccatcaccattgacggggaagaaaatgtcagggagggaagcagcggaaacgtgattggtttctctgtctccaccctgaacaacccgtttttcgtgaccctgacagaaggagccagaaaagccgcgacagagaataacgtggagctggtggttgtggacgccggagacgacgctgccaaacagaccagcgacatcgaggatttggtgtccagaaatgtgggcgtgctgattgtcaacccggtggattcagatgcggttgcaccggcggtaaagagcgccatgtcccaggggatcaaggtgattgcagtggaccgcggggtcaacggggtagatgtggactgccagattgcctcagataatgtggcaggagccaggatggcaacagagtatctcatggatcttgtgggagaaggcgccaaggtagctgaattacagggagtgcctggggcttcggccaccattgacaggggagcgggcttccaccaggtggcagaccaatccctccaggtggctaccagccagaccgctaatttcaaccgtgccgagggtatgacggttatggagaacatacttcagtccgacggaaccatcaaaggtgtgtttgcccacaatgacgagatggcccttggggcagtggaagcagttgctgcctccggaaaggacataaagattgtgggatttgacgccacggacgacgcccagaaggcggtgaaggacggcaaaatggcggccacggtagcccagaagccagataagatgggcgagacagccatcgggacagctgtcaaaatcatggcaggggagacagtggagaaatccatacctgtggaagtggagctgattaaatagtttcaacagattgacacatgagaaatggaccctccagaaccggaatttccgggctggaacgggtccatttccgcctgtatatttctatttttttaatgcctgttttttatccctgtcatgctccggggcttaccatgtcttttcaagttccgtcttaaagtctactgagtaaggattgtcctccctggtctttaaatcctcatagagcgccctgcgctcgtcggcgctttcctcggcccagtactcatagccccgcatatagcttgacatcaaatcatcccaggattcaaataagggctgcatggtcctggcgatttccagggatttatccaatgcctcctgttcggtgtagtagccggccagatagtaaaagctcatcaggttcatggcgcggcagtagtcccagcctgcaatggcgtcagggccgtactgctcatagaagccgaacatatccgcataattttgggcctcatccgcagtcatctgaaactggtccagcaggaaagcgcttctctcattcggggctatgtcccgaatgcctgcttcttccaggtatgccatgtcctcagcaaaggtatcgcggtggccctcggtcagaatccagtccagggtgctgtctgctgtaacgcggtctgtaacgctccaccattcttccagggatttctgctccatggccatgacatcatcattggctgccaggccggcaaaacggttgtagtcccagccgtttaagtccgtgaggaccgcgtaggaagcattgaaccagcgaatggtatccgtcagctctgcggtggttctgtcttccacctcaggagcactttcgcggaatttagaacaggagaccttgaaggatgcaatcttgctgtcattcatcttgtccgccgcataggccatggagtagtaggcatagtctgtctccccatatacaatataggcatccaccttggtgctgtccacggacatccttccggttatggcggttacattggtcatgcccggcacctccggtgcctcggctttggtctcgccggacagattgtagctggtcttaataatatccttcacatcctccatgctgccggcctggctggaggggccgtttttgatgaactggagcaggaacacggcgttgtcttccctgctgctggcggcaatcagccatccgtccatgggtgcctcctgggttttccaggacttgtccagataaatggacgcagtgtcatccggtgtggagaattcctgcatctgggccagcatatcctccggggttttggccccgcagccctgcagggctgcggatgccagggcagccgtgaggcagaataacagggccagtttctttggttttgtgcatttcatgcttttttcctctctttgtgggccttacgggtccgtttatagtaacagaaggggggtggatcttatgagtacagtatactatagaatcatccctgccggcaacggcaatttacagagatttccatagaagggaggctgacgggcagaactaaaaacagaaccaaaaacagagggaaaatcaaaagccaaaggccttgacttatgtttccaatcataatagaataaaaattggatgattttgggcgtacttccaaagtacgtccatcttttactcaatggaaaacggaggacgaataacttgtcacagatagataaccagatgacagaagagataaaaaagcggaggacatttgcaatcatatcccaccccgatgccggaaagaccacgctgacagagaaattcctgctgtacggcggcgccattaatctggcaggaaccgtcaaggggcgcaaggctgccaaacatgcagtgtccgactggatggagattgagaaggagagaggtatctcagtgacctcctctgccatgcagtttaattatgacgggttctgcatcaatatcctggacacaccgggacaccaggatttctcagaggatacttaccgtaccctgatggcggcagactccgcggtcatggtcatcgacggttcaaagggcgtggaggcgcagaccatcaagctgtttaaggtatgtgtcatgcgtcatatccccatctttacgtttatcaataagtttgaccgggaggccagggacccttatgagcttctggacgagattgaagaagtgctgggaatccgcacatgccctgtgaactggcccattggatgcggcaagagctttaagggcgtatacgaccggttctcaaagaagataaccaccttcacggctgccatgggcggtgccagggaagtggacagccaggaatttgcagtggacagtgcggatgtggattccatcatcgggcaggactatcaccagcagctgagggacgacatcgagctccttgacggggccagcgacgagttagatatggagcgggtcaggataggggatttgtcccctgtgttcttcggatcggccctgaccaattttggagtggagacctttctggagcatttccttaaaatgactacgccgcctctttccaggaagaccctggacggggtgatagatccgttccgccctgacttttccgcctttgtatttaaaatccaggccaacatgaacaaagcccacagggacagaattgcttttatgcgcatctgctccggcaagttcgaggcagggatggaggtaaaccatgtgcagggaggaaagaagatccgtctgacccagccccagcagctcatggcccaggaccggaaaatcgtggaggaggcatatgccggcgatattatcggcgtattcgacccgggaattttcgccataggcgataccctgtgcgcttccaatgagaagtttcagtttgagggcatacccacctttgcgccggagcattttgccagggtgcgccaggtggataccatgaagcgcaaacagtttataaagggtgtgaaccagattgcccaggaaggtgcaatccagatattccaggagtttaattccggtatggaggaaatcatagtgggagtggtgggcgtgctgcagtttgaagtgctgacctaccgtctgcgaaacgaatataatgtggaggtcatcctggagaagctgccctttgagcacatacgctgggtggagaatccgggcgaggtggatgtggccaggattcagggtacatctgatatgaaacgaattaaggacttaaaggataatccgctgctgctgtttatcaacagctggagcgtgggcatggtattggaccgcaatccggcgctgaagctctcagaattcggaagagcctgatcccatgcaggaaacaggaccatgggaccagactacggtccctgagtgctcataacgagccgctgcactaagctcgaagggacctcgctaagtgccagcggaatgtatcgcacgtaagggaccagactacggtccctaagtgctcataacgaggaggtaatattcatgagtaagattgatgctgtaagggctgccatggtggaagccatgaaggctaaggacaaggccaggaaggattctctttccatgctgctgtccgccctcaaaaatgcggaaatcaacaagagggagcctttgacggaagaagaggagaacgcggtcgttaagaaggaaatcaagcagacccaggaaacgtacgagatggcgccggcggaccgtgaggacatccggtcagaggcagccgccaggatggctgtttacaaggagtttgcgccggaagacatgagtgcggagcagattcgggaagttataaatgcggtcctgtctgagctgggaatcgaaaaccctacagctaaggataagggagccattatgaaggtcctgatgcccagggtcaagggaaaggcagacggcaggctggtcaatgagacgctggcttccatgttccgctaaggacgccccggggctttggcaggtcccggtccccccggcttggtgcgctgagcagcaggccggacagagcagaaggcgggacggagcagcataataaaaggatgcggggcttaagcttcgcaggaaaaggagacggttacgatgtataggaatgaaattgaaggttttattgattcccacagggaagaaatgatagaggatatctgtacactgtgcaggattaacagtgagaagatgccttatgtggagggcaagccttacggggaaggcccgttccaggcccttcaggcagctcttgccatggcagagggttatggtttttccatccgtaattatgacaattatgtgggaacagccgacctcaatgacaaggagagacagctggacatcctggcccatctggacgtggttcctgccggtgagggatggacggagacaaagccctttgagccggtggtaaaggacggaaagctctttggacgcggtaccgcggatgacaagggaccggccgtggctgcgctttatgcaatgagggcagtgaaggagctggggatcccgttaaataagaacgtcaggctgattctgggtacggacgaagagtgcggaagctctgatattgtaaattattacgacaaggaggatgaggcgcccatgaccttttctccggatgcggaattcccggtcatcaacattgaaaaggggcgtctggaaggtcatttccatgcatccttccaggcttctgaggcaatgccaagactggtgaaggtggaagccggaataaaggcgaatgtggtaccgggcaaggccagggctgttgtggaaggcattgaccttaagacattggaggccgcggcagaggctgtggagaaggagacaggaatttcttttgtactggagggtgatttaccggttatgacagttactgcccagggggagggcgcccatgcatccacaccccaggagggaaaaaatgcccttacaggcctgctggtgtacctgacacgcctgccttttgcagagtgcccccagatggatatggtgaagaacctgctgaagcttttcccacacggcgatacctgcggaaaggcagccggaatcagcatggaagacgagctgtccggtgctctgacccttgctttcagtatgctgactgtaggcgctgatggactggaaggcgtatttgacagccggtgcccaatctgtgccacagaagaatctgtgctgggagtggtaaagcaggccatggcggaccaggggcttacactggaaaatgattccatgataccgcctcaccatgtggacggaaattctcatttcgtaaggacgctgttgtccgtatacgaggactacacaggccttgagggcagctgccaggctacaggagggggcacctatgtccattctctgaagaatggtgttgcctatggcgcggccctgccgggaacagataaccgtatgcatggagccgatgaatttgctgtggtggatgagcttgtcttaagcgcaaaaatatttgcacaggtcattgtggagctgtgcagctgatagcggaaatataccctgtttttctgtgacctgattgtgaatgaggggatgatggaatggtgagactgggatgtgtaccggaacagggcgggccatccgcttatatggaaaatgccaaggcggtccggacggcgccgccggggtgccaggagcaaacagatggtttgggtaaaaatggtcccgaaacaacggccgtcagaagtaatgacagtgcctgccgggatcaggctgtgtggagctggacagagggcgcggacgattggagagagcaggctgtccgaatgctggaacagctgaaaaagcagtatccggacattgtgttccatttggcgcaggagaaggacgctggtgatttggctaccctggctgtccgggcagggaccggcgtacatctgtatctgtcccgggaatttgtggggcgcatgggcagcagccgggaggactttagccagtgctggtctgagctggtatctgcggccggaactctgctggcaaaacagggacagaccagggccgtgggagcatttttaggggaggaagggacttcctactggtctgtgcaggataaaacggaaaaggaggctgtgcctgtggtctcacacacaggcgcaaaagagacaccttctgcaggcagcgaccccagggtgcgagtttctgtttcacttaatgtctccagccatttttcccgggtggccagggcccgcaccaagggtcaggtgcaggaggctgtgtgggacatatacaggtccatttccaatctgaagagggcggcagcctgtggtgatgaccaacagcgtgtaaaggcatctagagccctgcgttccctccagaagctgctgggccgcagcggcaggaagatgcggaagctggagcgggagcggcttaaggcgcaggaacagaaaaaggcggaaaaggaacaccaagacaagcgggccttccggcttaagcaggagaaaaggcgcatgcgctcggccagactgggatcagatgcctgtcttgtgaaggaaggccatggagatgacttttatattcaggcgtacaggcggttttcaggaaccgcttataaatgggagcaccagatgccagcgggcaccatggcaggcctttttgacgccgttccatcaggaggcagtgggatggccggcacggcggaggccggatttacggcagctgatgtgattgtctcaggagacaccctttaaatcataacgaacattttagaagggtgtttcaggaaaaagtgcttgacaaataggttcatgtgatgtattttcttaactaagataaatcccagcgatttaataggaatcaatacaggaggaacgtatgaatcagtttagagccatgcagatgaatatggatatgatgaacagcatgtacatgatgatgtgctgtgtatccgcatgggcaaaaaactgaatgtaagtttcatctgtatggattgtgattaatcaggagatatcccggtagcagggaaagattcagggccgcaagtccgtgcaggacatgcggcctttttgctgtaattttgcctgaacgctggaggctgccacgatgtggccagggcgcgggcatgtgcgggaccccgaatatgtgtttcaggaacaaaagaaaggaattaaacctatggaagcaaataacgaaaatcccatcattcagctggtggggctgggtaaacagttccagaccatgaatggtccggttactgccctggaggatatcaatttggaaatccggtatggagaggtgttcggtatcatcggcctgtccggtgcgggtaagagtaccctggtgcggtgcatcaattatctggaagtgcccacttcaggaaaggtcgtatttgaaggaaaaaacctgtctgtgatgaaggacagggaaaagcgtctggccaggcagtccatgggcatgattttccagcagtttaacctgctgtcccagagaaatgtgcttcagaatgtatgctttccactggaaattgcaggggtatccaaggccgaggccaaaaagcgggcagaggagcttttaacactggtgggtctggaggaccggatgaaggcatatccggcgcagctttcaggcggacagaaacagagggtagccattgccagggccatggcaacgaacccaaaggtccttctgtgtgacgaggccaccagcgcgctggaccccaacacgaccaaatctattttggaactgcttaagaagataaaccgggagatgggaattactgtcattgtcattacccatgagatggcggttattgaggccatatgcgacagagtggctatcatagaccacagccatattgcagaggtgggaaatgtgtccgatatcttttccggccccaaatccgatatcggccgtcagctgattctgggggatgtggctgagcagaacttaagctttggcaattcccgccagatccgcattatttttgacggaagagagtcttctgagcccgtaatcgccaacatggtgctggcctgtaaggttccggtgaatatcatgcatgcggacaccagggatattgaaggcaaggccatgggacagatgatcatacagcttccggaggacgatacggatgccggcaggatttgtaactatctgaaaacagccaatgtaaagttcgaggaggtgcggtgatatgcaatttgatgctacgaccataaatatgcttgtaaaaggaatctgggagacgatatacatggtattcctttcctctgccttatcctatgtaattggtattcccctgggaatcgccctggtggtgacggacagggagggcatcagcccggtgcctctgtttaacaaggtcctgggtctcatcatcaatctgctgcgttccgtgccttttatcatcctgttaatcatggttctgcccattaccaagttcattgtgggaaagaccataggatccaatgccacggtggtgcctctgattattgccgcagccccttacatagggcgtatggtggagtcttccctgaaggaagtggacgcaggtgtcattgaagcagccaaatccatgggcgcatccacctggcagattatagtcaaggtgctgctgccggaggccaagccgtctctgttggtgggagcggccatatccgtgaccacaattctcgggtactctgccatggcaggatttacaggaggaggcggactgggagatatcgccatccgttacggataccaccgttaccagaccgatatgatgatggtgaccgtagtgcttctggtcattattgtgcagctgatccaggaggtcgccatgcgcatgtccagaaagagtgataagagaatccggtagaaagattcctgaacacaatccgggaagagagtgcgggaacagaatccagggaatccagtaacagaatccaggaagagagtcccgtgatacagagttgtatgtgaatctgccgaggctgtccggtttcctgacaaggaacggataacgtatatgacctgcatatgaggaaggacgtgcagcctgggctgatgataaatgccgtatcatggcgcaaaataacaggggcagagccccaacgcgaggaggacacaattatgaagaaaaacatcttaggcgcagccgtactggctgcagtattggtatcaggagcgctcagcgcatgctccggcagcccaaaggagactgcggcggcagatacaacggcagcaactgccgggactcaggctgctgattccaaggaagaggaaaccacggcggcagaggcggagaccacccaggccagtgcagaactgaaggaaatcgtggtaggagcaagcccggcgccgcatgcggaaatcctcaatgcagcgaaagaggttctggcatccaagggctatgagctgaagattgtggaatatacggattatgtacagcccaacaatgcactggattcaggagacctggatgcaaactattttcagcacaagccatatctggattcctttaatgcgcagaacggaacaaagctggtcagcgcaggcgccatccactatgagccattcggcatttatgcaggcaagacagcatccctggaagagcttcctgacaaggcaaccgtactggtgccaaacgatgtgagcaatgaggcaagggcccttcttcttctggaagcgcaggggctgattaagctgaaagacggcgttggcctggaggctactaagaatgatatcgtggagaataccaagaacctggatatcgtagagttagaggcagctcagcttccgcgttccatttctgacggcgatatcgcggttatcaacggcaactatgcaattgaagcagggcttaaagtcagcgatgccctggctactgaggattcccagtcactggcagcaactacctacggcaacgtggtggcagtgagagagggagaggagtccagcgatgcaaccaaggccctggtggaagcattgaccagccctgaggtaaagcagttcatggaggaaacttatgaaggcgcagtggtgccgctgttctaaagcatattttaaggcgttttcaagcatactcctaaggagagaatgcagttattcataaaattgtaagaggctgtccgccggggatataccctggcggattgttttattttacaaaatatgttatacttttccaaacgtgtgccctgtatctgggcacatgaacgcggccgtatgggcttgagagaggagataatccatggaaaatgaaaacggaaacagatacggtaccggggaaggccaggggacggattatcatacaggtaacagggaaccagtgattgtggcggaacagccggccagagaggtgacagaggaggactccggacagacatctgccggacaggatggttccgatggatggagcagtcctgtggacgcacccttacaggaggacaggtggagcgaaaccggggataaaccctatctgggaagtccctgggaaccaaccccatccggggcatcgtatgacgcaggaaaggaaaatggcgtcagcggaaatgacagccagccggtatataagccagctccggcttcttatggtcagggccagccgggggcaaatcagggtcagcccggaataaatcagggtcagccggggaccggccagggcggcgatttcagccaaaatgacagacgccgggaaagaggaggcagtcagacgggcggaaacagccaatgtcagccacaataccagacccagtatcagacccaataccagtcttaccagcctgcgtatcaggaaaagaacaatatggccacggcttctctggttatgggaattctttccctgtgcagtatctgctgctgcatgctgttcggtgtcgtgttcggcgtgctgggcatcatatttgccattatgtcaaaaaaaggagacagaatggacagccaggcaaaggccggactgatactctctattatcggtgttgctgtcactgtgcttattatcatcttttttgttgtgattgaggtgttggctgtcataccggaactgaactgaaacagcggctatcagtaacatttgacgggtaccgccctgcagaatggctgctatccgcgtaaccgcggacagccggtattttcaaaaatcaggttttaatcggacagtatccggcatatagtaagtagcaagagaggccgggaggctgtggacgtgaggatttacgacctgaaacaaaaagaagtgattaatgtaaagacctgcaagcgccttggatttgtgggagatgtggatttcgacatggaaacgggctgtctgctggccctgattgtgcctgggccgggctgtatatgcggttttttgggccgggagaaggaatatgtgataccattctgcgatatctgccaggtgggaaatgatatcatattggtggacattaaagaaaaagatgtgacggaaagcattaaatgctgaaagaaaatatacggcggctgaaaggaaacatacagcgcggattccagggggattcgcgcttttttcagcccctcagggcagaggagtggccgccagggcttcccctgccggccggtttgtgagaaaaagttgtatgaaaagcatttgctttttacaaatctaactatacaaacgaattgtgaaggttttatggtggaaatgtgaaaaatctgtgaaggggtaccataaaatagtcacaggttttcgtggatggctgtcaggaactccttcagcttccccacttcaatctggcccggtgcagaggcttcctttacagagccaaaggtcaggcaggagccgaacacctcccctgacagacggcttatgagcccggtgcctttcatggacatggtgatgagcggacaggacagggactggctggccttgtgggtggcggacaggagggtcagcacatcgccggctgactggggcatcaccgcaatcttggctatgtctgcccccaggtcctccatatgatgcaggcggcggagaatctcctcctctttgggggtggctgcgaaatcatggttggacaggatgacgcttacctggtgtctgtgggccaggtctattgtctcacgtatcatatcgtcccccgagaaaagctccaaatccaccagatgtacatggccggagcagatggcgtgttctgccagggagcggtacgccggcaggggagcggacagatgaccgccctcccgttgggtacggaaggtaaagagcaggggaatgtctttcagggcagactccaggccgggaaggacctggtccagggtgtccggctccagtatggaatcaaaccagtccgctctccattcggctatatccactggctgctccgtgaaggaggcagcctggtgaatcagggattcataatccttttccaccagcggggcgcatattttcggcattccccgcccaagtattgtttgttttatgatgacatttttcatgataaggagcacctttcctgtaatctttttggatttgtctggattcattataaagcggggaggggatttcgtccatactgtaatgaaaaaagaacaaagtccttgctatccatactttcttcggttaaaatatatgaagcgtttaaggcgatacgtgaaaaaagaaaggatgggtaacccagatgaaatgcccctattgtaatgaagcagacaccaaggtcatagattcccgcccggcagatgacaacagctccatacgcaggcgccgccagtgcgagcgctgcggtaagcgctttaccacctacgagaagctggaaaccatgccgttaatggtaataaagaaggataattcccgggagacatatgaccgttccaagattgaagcaggaatcattcactcctgccataaacggccggtatcaccccagcagattaattccatgattgatgagattgaaaaccagatttttaacatggaggaaaaggaagtgcccacctccgccatcggagagctggtgatgggaaagcttaaggacctggacgaggtggcgtatgtgcgtttcgcctctgtttaccgggaatttaaggatatgaatacgtttatagacgagattggaaaattactgaaaaaatagaattgctaaaatagattggaaggaatacttataaacatgctggaaatgttttatccccgccgttacgaggtttcaacttatgtgataccttttgactattatcatgcacagggaatgcagggtgtgatttttgacattgataataccctggtgccccatgacgcgccggcagacggacaggcagtggaactctttgagcggcttcgcgccatgggaatgaagacatgccttttatccaacaataaggaacccagggtaaagccctttgcggatttggtgggttcctgctatatccataaggcaggcaagccgggagtcaaaggatatgagaaggccatggcgcttatggggactgacagggaacatactctctttgtgggggaccagctgtttacagatgtgtacggtgccaacagggccggcctctacagtatcctggtaaggcccatgaaccccagggaggaaatacagattgtgatgaagcgttacctggaaaagccggtgctgtatttttataaaaaacacgccagagatgtaaaccaatacagggagtaaagtgagacaatggacggaaagacaagagtatgcgggctgattgcaaatccggtggaacattccatgtcacccatgatgcataatttctttgcgcagagaacaggggtgaatttagcctacgttccttttaaggtggaggaggaccgggtgggggacgcagtaaaaggggcttatgccctgaatatactggggatgaacgtaacggttccccataaacagcgggtaatggaatttctgtctgaactggatgaggatgccagggccatcggggcggtcaatacactggtcaggacagaagcggggtataagggctataatacggacggcgcaggccttaagcgggcttttgcggaagccggtatccggacagaaggagaacactgtttactcattggggccggaggcgcggccaaggcagcagcctatgtgctggcaaagggcggggctgcaaaaatccacatcctcaaccggaatgaagccagggccagggagctggccggctatatcaacatgctgaccggcagaggtctggcggaggccctgtccctggagggatacaggaatcttcctgccagaaagggcggttatctggctgtacagtccaccagcgtgggcatgcatccccatgtggaggatgttattattgataatccccggttttatgagatgattcatacgggtgtggacattgtctatactcccgccaggaccaggtttatgaaaatggtgcaggaagcagggggaagggcggtgaacggcctggacatgcttttatatcagggtgtgattgcctatgaactttggaatccacaggtcagggtggacagtgggaccatagagctggcaaagcagatgattgaaaattacctgcaaaagaaacaggcaggggagggcaggggagataacctgattctcattggcttcatgggtgctggaaagtcccgtgtgggagagcatttcgcagcacgctaccggatgcccataattgatacggacaaggagattgaagcggccgccggtatggccatatccgacatatttgccacccagggagaggaagccttccggcgcctggagacaggcgtactggagaagctgctggagcagggaggcagatcagtgatttccgtgggcggcggactgcctctcagggaggaaaacagggcgcttctcaaacagctgggaaccgtggtatatctggatgtcctgccggaaaccgtcatggaacgaatcggatccgatgtgtcggaccgccccatgcttcacggcggtgatgtgatgggacgtatcgtcagccttctggagtcgagaaaaccccattacctggaagcttctcatatcattgtggatgtgaacggacgggacgtggatgatatcgtggaagagatttaccgcagggcagcggataaaacttgctaaaaagggagaaatttatactgccgttaaaaaagaacttgaaaatgctccctacatagtatagaatataaaagattaaagacttatggggcgcttaggcaagcgtcatgaacgaactcaaggaggaatatctttatgatatcagcaggtgattttaggaatggcattacactggagattgacggacaggttgtccagattatggaattccagcatgttaagccaggcaagggcgcagctttcgtgcgtacaaaattaaaaaatgtaatcaacggcggcgtggtagagcgcactttccgtcctacagagaagttccctcaggccaggattgacagagtggacatgcagtatctgtatgctgacggcgaattatataactttatgaaccaggagacctatgatcaggtagccctgaaccaggacatcatcggcgatgccctgaagtttgtgaaggagaacgaagtatgtaaggtctgctcttacaatggcaatgtattctccgtagagcctccgctgtttgttgagctggagattacagagacagagccaggtttcaagggtgataccgcaaccggtgccaacaagccggcaaccgtagagacaggtgcaaccgtatacgtaccgttatttgttgaaatcggcgataagattaagattgacaccagaaccggcgaatatctgtcacgtgtataatacaactgtcagatacgccctgggaggcggtttgtaagaattgctccggtatttgccggggcagtttttaactttccgggaaaaggaaagacctattgtcacagtaaaggagagtatacattgtgaataagattctggatatgatggagcgggaattaaagcaggcatttacagccagcggatatgaggattcattcgcaaaggtggttttgtcaaaccgtcccgacctgtgtgagtaccagtgcaacggtgccatggcagcggctaaggcatataagaagaagcccattgatatagcgaaccaggtggtggaacatctgatctcaggcggctcccaccctgttttttccgaggcggaggctgtaatgccgggattcatcaacctgaagctgtcagaggcgttcttggcagagtatacgggttttatggctcagtcagataagctggggttggaagcacctgagaagccggagactgttattgtggattacggcggggccaatgtggcaaagcctctccatgtgggccatctgcgggcagctattatcggggagagcataaagcgtatgggccgtttcctgggccaccatatgattggtgatgtgcacctgggggactggggactgcagatgggccttatcattgaggaactcagggacaggaagccggagctggtgtattttgacgaatcctttgagggaccatttccacaggaggcgccctttaccatcagcgaactggaggagatatatcctgcggccagcgccaagtccaaggcagatgaggtgtttaaggagagggctcatcaggcgaccctgaagctccagagaggatatgccccataccgggcaatctggcagcatatcatggctgtctctgtggctgatcttaagaagaattatgcaaatctgaacgtggaattcgatttgtggaagggcgaaagcgacgcggaaccctacatcggggacatgattcagatgctggtggataaggggctggcccatgagagccagggcgctctggtggtggatgtggctcaggatacggacaccaaagagattccgccctgcctggtccgtaagtcagacggagcttctctttatgccacatccgatttggcaaccattgtggaacgggaacaggattttaagccggaccgctatatttacgtggtggataaacgccagggaatgcactttgagcaggtattcagggtggctaagaaggcaggtattgtgaaggaagatacccccatgattttcctgggcttcggcaccatgaacggaaaggacggaaagccatttaagacacgtgagggcggagtcatgcgtctggaaaagctgattgaggagatcaatgaggcggtataccagagaattatggagaacaggaccgtatcagaggatgaggccaggagtacggcagctgtggtaggtctggctgccctgaagtacggtgatctgtccaaccaggctgccaaggattatgtctttgatattgaacgttttacctcctttgagggtaatacaggtccatatatcctctataccattgtgagaatcaagtccattatcgccaaatacagggagaatggaggccaggtaagccaggatgccgttgaaaagaagattcttgcctgcgccggaagttcggagaaggccctgatgcttatgttggccagatataatgaagttctggaaaacagctttgcggagacagcgcctcataagatatgccagtatatttatgagctggccaatgcttttaacagcttttatcacgacaccaagattctggcagaggaggatgaggccaggaaagagagctatatcgggctgatttcccttaccagacgggtgctggaggcctgcatcggactgttgggaatcgaggctccggagcgcatgtaaccgcggggatgtcctgggatgctgataggtcctgccttggggcaggggtatcaggaatcccgctgaaaggatgcatgaagcagatgaagattgtcaggatgaacaccagcagcttctggaagggggaggctggtgtgaaaggcctggttgaagaccagggggaaacatttgaggtaaatttatatctgggaagcggaagagtaagggattactcctgttcctgcagcaaagggaattcttacaggggaatgtgcgcccatggggaggccctttttgcgtattataatcagcagagggaggaggcgtccaaaccaacggttcatacatcctcccaggttcacaccatgattcgggaatacaccaaccgggaggtggccctgattctggcagaggaggtggacgctcaggtaaggctggagccggtgctgattctggacggtaaagacacgcgtctggagtttgaggtggggattacccgtttttatgctgtacgcgatttgagggcctttaaggaggccgttgaaaatggtgcccatgtggcctatggaaaggacctgtcctttcatcaccacaaatcggcttttacagacagcagcagggaactgctggccctgcttatgggaggggtgcaaaaccagaaagcggtccgcagcctgacccttaaccgtatgaaccgggatcagttttttgaaataatgtctggccggaccgcaaaggtccagcttcccggcgggaaccgggtcatgatggatatggaggattctgatcctgtggtctcgcttaaagtggagaagacgggaagggacggcctgaaagccagccttatgggagtggcgccaatgaaaggaagcgaagggccaaggcaggtggcggggtgctttcgcggggagcggtttctgtatgtggtgtccggccagaggctttaccggtgcagcgagtcatgtacccaggtcatggggctgttcatggagcagatgtgcatggagcgggatgaaagcgtgatggtgggtcagagggatattccgctgttctatgagcgtgttatcaagcatattcttccgtattgccgtctcatgctggaggatgtggattttaaggattatgagccggagccgttaaaggtatccttccggttcgacacaggggaggatggggctctggtgatggaaccaacccttgcctacggcggctatgaattccatcccctggaggacgagaatcttcccaggacaatatgccgcgatgtgccgggggagttcagggtaagccagctgatccataaatatttcaagtacaaggacccggagggaatacggctggtcataaggaatgacgaggatgagatttaccgtcttatgacagagggaatggacgaattccgttccatgggagatgtatatgtgtctgagaacctgcgtcagtggaaggttctggcgcctcccagggttactgtgggtgcttctgctgccggcggctggctggaactggatgtggatatgggtgacatgaatagccaggaactgaaccggatactggcggcctacagccagaaaaagaagtactacaggctgaaaaacggacaatttctgggactggatgaaggcggtctcacggtcatcagccgtatggcatcggaattgggagtgaccagaaaggagcttcagagcggcaaggtccgtctgccggcttaccgtgccttctatctggattatctgcttaaggagagtaccggcgtaacctattacagggaccagatgctaaaggccatggtaaggtcggtcaagtctgtggaggacagtgattttactgcgccggaaagactcaggggcattctgcgggagtatcagcgaatcgggtatgtctggctgcggaccctggacagttacggattcgggggtatcctggccgatgacatgggattgggaaaaaccatacagattattgccctgttggaggacgcctatggctcaggcgaacaatctccgtccctgattatatgcccggcttccctggtctacaactgggagcatgagatccggcgttttgcgccggaccttaaggtattatccgtggtgggaagcagttcggagcgggaggtccttttaaatgaggtgggaagaaatccgcaggactatcaggttattgtgacatcctacgatttgctgagaagagatgtaggcttatatgaagccatccacttccggtatcaggtcatagacgaagcgcagtatatcaaaaacgcatccacacagagcgcaagggcagtgaagtccctggatgtgcagaccaggtttgccctcacagggacgcctgttgaaaaccggctgggggagctgtggagcattttcgattatctgatgccgggctttctctttggaagccagttctttaagagggaatatgaaatccctatcgtaagagagggtgacggggctgccctcaaacggctgaagcggctcataggtccctttgtgctgaggcgggtaaaaaaggatgtattaaaggagcttccggataagatggaggaggtggtatattccaactttgaaacggagcagaaaaaattatatgcagccaatgcggccaagtttaaggagaagctcagcacaggcggttttggccaggctggggaaggaaagctccagattttagcggagctcatgcgcctgaggcagatttgctgcgacccgcggttatgttacgacaattacaggggcagctccgccaagctggagacctgtatggacctggtgcgaaggggcgtggcgggaggacataagatattattgttttcccagtttacctccatgctggatattatttatacaaggttcgagaaggagggaatcatgagccacatgctgacaggggccacctccaaggaagaacgaatccggctggtgggagattttggaaaggatgaggtgcctgtattcctgattagcctgaaagcggggggaaccggcctcaacctgactgcggcggatatcgtcatccattatgacccgtggtggaacgtggctgcccagaatcaggccacggacagaacccaccggataggccaggataagcaggtaacggtctataaactgattaccagaaataccatagaagagaacatcttaaagcttcaggaagccaagagccatctggcggatgcagtggtgcctgagggcacgatatcctttggcagcctgacaagagatgatatactgaatatcataaaggaggaataggaaatgaaagtattaatgttaaacggaagtccccatgagaaggggtgtacctacacagcccttgcagaggtggcaggagagctcaaccaggccggcattgaaacagagattatgcatgtgggcggcgggactgtccgtggatgcatgggctgcggcgcatgcggtaagcttggaaaatgcatttacagtgacgacaaggtcaacgaagcagtggagaagatgaggcagagcgatgggctgattgtgggttcaccggtacactatgcttcggccggcggggctatcacctccttcctggaccgtttcttctattccggaagcagtgctgctgcccataagccgggagcagccgttgcttctgccagaagggccggaacaactgccaccctggaccagctgaacaaatattttatgattacgcagatgccggtagtgtcctcccagtactggaatatggtgcacgggcaatgtccggaggatgtaaaaaaggatgaagaaggcatgcagattatgcgcgtattgggcaggaacatggcctggatgctcaaatccattgaggccggaaaagctgccggagttacgctgcctgagacagaggaaaagaaacgaacgaattttatacggtaggaaaatggctgatacgtgaaggttagtgcatgaaatcaatacatggaattaatacatgaaatcaggatggactgacttaagactggggcccgcccggcactatggtgtgccgggctttttgaatatggctttatgtacggctatgccaatgcggtatgtatggtctgattatgaatgtgctggtccagtattaaatgaacccgttccacttcaccgagaatcagggtttcggacttcgtgatttggtttcttaatacgcgctcagtggatttaatctggaattccagactgtccatgcgggtgttcagggattttatgtcagacggtatattttgtatatcagatttcatgccctgcatttcggcttttacgcctaagatgtcggatttcatgccctgcatttcggcttttacgcctaagatgtcggatttcatgccctgcatttcggtctttacgccttgtatatcggttttcataccccggatatcagtcttcatatcaattatttcagtcaatatgacatcaagtttatcagaatcagtcaagctgtcacctcctaaaaacagtgtgctgtttcagtgtgccgaatcgcggtttgtgtttcgtctggaaacagggtgtaattaagtatagcagatcggaacatgtaaatccaggctgattttagcattttttgtaatgattttcaccggatttccccgctggttttcagaaaaaataatgcttgtcacaaatcccccattctgttatactttggtataattaactagctaattatatgcaggctaatggttaatcagtcagatatacggaaaggaggcaatctacatggacaaagcatcacgcagctgttttgttcaatccccggagcactgtctcgtagagaagtacatccgggtggccaggctgcaccggagtatgatggagcgccgcctggacggcacaggggtgtaccgcagccagcatcagatactgatgtttgtgtcggataaccccaacgtatcccagaaagaactggcgaggatgtatggcgtgtccggggctaccatcgctgtttcccttaagaaactggaaagagggggctatatcaggcgcctggtggaccaggaggacaaccggtgcaaccagatttgcataacggataagggaaggaaagtggtggaggacagcgtaaagattttcaggcaaatggagagccgcatgtttgaaggattttccgagagtgatatgaaggtgctgggacaactgctggaccggatatacgggaacctggaccgggagtttacggacagggcacaaagggaggaatcataggtgaaacgatacagaaagtatataaaaccatatcttggagcctttatccttggccctcttctgatgctgacagaggtggcgggggaaatcatgcttcccaaactgatgtccatgattatcaacaacggggtggctcagagaaacgtgcagtacatcctgtccgtgggagggctgatgatactggctacccttataatggctataggaggaatcggtggtgcctatttttccgtgaaagcagcagtcagctttaccagcgacctgagggacgaccttttttccaaggtgcaggaattttcatttaagaacatagactcatacagcacaggttcgctggtcacccgtctgaccaatgatattcagcagatccagaatgtgcttatgatgggactgcggatggccatgcgcgctccgggcatgttcataggagccctgattatggcctttatgatgaatgccagactggccgtggtcatcctggtggtaatccccctgctgacagccgccatagccgtcatactaaagacagcattccccagatttaccgccatgcagaaaaagctggaccagctaaactccggcattcaggaggcgctgaccaatgtacgggttatcaaatcttttgtgcgggaagagtttgaggaagaaaaattcagggatatgaaccaggatttaaagaacagcagtctggacgccatgaaaatcgtgattgtcaccatgccggtgatgacccttgccatgaacataaccacgctggcagtggtgtggtacgggggcaatatcataattgcaggggatatgccggtgggggatttaactgcatttaccacttatattgtgcagatactcatgtcgcttatgatgctttccatggtgttcctgcagctttccagggcagtggcatccatccgcagggtgggtgaggtcatggacacggagagcgacctgacagaccgggatgcatccaggaaggacctggctgtattgaagggaaaggtggagtttaaacatgtgagcttcagctatacggacaaccgggatgagatggtactggaggatataaattttacggcagagccaggtcagataataggcattatcggctccacgggaagcggcaagaccaccctggtgcagatgataccgcggctctacgatgccacaaagggccaggtgcttgtggacggggtggatgtcagggaatattccctcaaaaacctgcgggaaggcgtgggcatggtgctccagaaaaatgtgctcttctcaggcaccatagaggagaacctgcgctggggcaaggaggacgcctccatggatgaaatcagggaaatggcacagagcgcccaggcagacagctttgtcacatcctttaccaacggctatgatacggacatgggacagggcggggtcaatgtatcggggggccagaagcagagactctgtattgccagggccctgcttaagaggcccaaaatcctgatactggatgacagcaccagtgctgtggatacggccacggaggccaggatacggcagtgttttaacaccagccttaaggacaccaccaaaatcataatagcgcagcgcatcggatccgtggaggaggctgaccggattttagtgctggatgaaggcaggctcatcggccaggggacccatgaacagcttatggaggaatgtaaggcataccaggagatttattattcccagagggaccgaaaggagacggctgtatcatgacgagacaacagaaagcggaaagcctgaaacggcgctatggaagacatggtgctcctgaggccaggggtcccatgggagggagaagacatgggccggggcggaatatggcgatgggccccaaaaggctgcccaggaacgcaggcaccaccatcaggcgtcttctgcattatttaaatgaggataaatccaagatgatgctggcatttttctgtgttgtcctcaacacagcgtcaacgctggcaggctcctacatgctgcggcctatcatcaatacatttattgccccgctaacaggaggtcccggggatccggcaggacttgcaagggccctggctgtgctggcggctgtgtttgccgtgggggtgtttgccaattatgcccaggcaaaggtcatgctgaccgtggcccaaaatgccctgcagaaaatccgcaatgacctgtttggcagaatgcagaagctgccggtccggttttatgataccaactccaacggtgatttgatgagccgttttacaaatgatgtggacaccatcgggcagatgctcagctccacgctggtacagctgttctccggaacattaagcatcatcggaaccctgttcctcatggtgtacaccaacctgattctgactcttgtcaccctggtgatgattcctgttatgatgaaagcgggaggagctgtggcagggtggagccagaaatactttaccgcccagcagacgtccctgggagccgtgaacggatatatagaggagaccatcaccggacagaaggtggttaaggtattctgccatgaggatacggccatagaggaattcggcatactaaaccatgacctgaggcacaaccagattcgggcccagttcttcggcggtatcatggggcctgtgatgaacagcctgagccaaatcaactattcccttaccgcctgtgtgggcggcctgctctgtgtgctcaggggctttgatgtgggcgggctgaccgtattcttaaacttttccagacagttcagccgtcccatcaacgagatatccatgcaggtcagcaatgtattctcagccctggccggagcagagcgtgtattcgcggtgatggatgaggagccggagccggccaacaccagggactgcatagtgccaagtcctatgattggacatgtggtgtttcatcatgttacctttggctacgatccggataaaaccattctaagggacataaacctctatgccaaaccgggacagaagattgcctttgtaggatctaccggcgcgggaaagaccaccataacaaatctgctgaaccggttttatgacatccagtcaggctccatcaccattgacggggcggatatacgaactatttcaagggatgccctgcgaagcaacattgccatggtccttcaggacacccacctttttacgggcacggtgcgggagaatatccgctacggcaggctggacgccacggacgacgaggttattcaggcggcaaaaacagcatccgcccactcctttatcatgcgtcttccccacggatatgacaccatgctggagggggacggggccaatttaagccagggccagagacagcttctcaatattgccagggcatccatatccaaggctcctgtgctgatactggacgaggccaccagctccgtggataccaggactgaaaaacacattgagcacggtatggaccggctgatggcggaccgaaccaccttcatcattgcccacaggctgtctacggtgcggagcgccaacgccattatggttctggagcagggggaaatcattgagcggggaacccatgaggagcttctggagatgaaaggacggtactacgaactgtatacaggcatgaaagaactggaatgattgccatgaaattaacatgtatttaacatataattaaaaaaataacatatataatctgtattgtatacaatctttatttatgctatactaaattggtgtattccggcgggggcaggcagccctgccggtcataccgggcgctggtactggtccggccgcacaaaggaataaaacaaagaaaagagggagagaatccatgggtttggcgacttttataggcggcatccatccatatgaggggaaagagctgtcagagaacaaaccggtacaggtcctgatgccaaagggcgacctggtgtatccgatgtcacagcacattggtgcacccgcgaagcctctggtagcaaagggcgatcatgtactggcaggccagaagattggagaagcaggcggtttcatctctgcaaatgtaattgcttctgtttcaggaacggtgaaggccattgaaccaaggcgtatggctaacggagcaatggtgccctccattgtggttgaaaatgatggagaatataagacggttgagggcgtaggagaggacagggacccatcaggcctgtctaaagaggaaatccgcaacattgtgaaggaagccggtatcgtgggtctcggcggtgcaggattccccactcatgtaaagctgactccgaaggatgagaacgccatcgagtacatactggtcaacggcgcagagtgtgagccgtacctcaccagcgactaccggatgatgctggaagagccggagaaaattgtaggcggcttaaaggtcatcctccagctgtttgacaatgcaaagggtgttatcggcattgagaacaataagccggaggccatcaagaaacttaccgagatggtaaaggacgagccgcgcatcacggtctgtccccttatgactaagtatccgcagggaggagagcgttccctgatttatgccgttacaggcaggaaggtcaactcgtccatgcttcccgcggacgcaggatgcatcgtggacaatgttgacaccgtgatttccatttacatggcagtgtgcaagagcacgcccctgatgaggaagatcatcacggtcaccggagacgcggtggcagaccccagaaatttcagcgtaaagcttggaaccaattaccaggagctgttggacgcagccggcggttttaagacggagccggaaaaggttctgtcaggcggccccatgatgggccaggccatatttgacctgaatatcccggtaagcaagacttcgtccgccctgacctgcttcacaaaggaccaggtggctgagatggagccttccgcatgcatacggtgcggaaaatgcgtcagtgtatgtccaagccacatcatccctgtgatgatgatgcaggccgccctcagggacgactgcgagacattcgagaagctgaacggtatggaatgtatggagtgcggaagctgcacctacatatgtccggccaagaggcctctgactcaggcatttaaggaaatgcgcaagacagttgcggctaaccgcaggaagaaagggtaggaggggacataagtcatgagtaaattattaaacgtatcatcatccccgcatgtgagaagccatgagaccacccacagcatcatgctggacgtggccattgccatgttgcctgcaactgctttcggtgtgtatcatttcggcatgcatgcgctgctggtgcttatagttacggttgcagcctgtgttttaagtgagtatgtatatgagaagctgatgaagaagccaagcaccatcagcgactgcagtgccctggtcacgggcctgattctggcactgaacatgcctccggagattccggtgtggattcctgctctgggcggaatctttgccattatcgtggtgaagcagctctacggcggcctgggacagaactttatgaacccggctctggcagccagatgcttcctgctgatttcctttgcgggaaaaatgacaaatttcagctacagcgggtttgacggcgtgtccggcgcgacccccctggcagtgcttaaaagcggcgggaccgtggatgttccggccatgtttgtgggaaatatcccgggcaccatcggagaggtttccgtgattgcccttttaatcggcgcagcctatctgttggcaaagaaggtaatctccatccggattccaggcacctacatactgacggttgtggtatttgccatcctgttcggaggccatggatttgatttaaattacattgcagcccatctgtgcggcggcggcctgattttcggcgctttctttatggcaaccgactatgtgaccagtcccatcacgccaaagggccagattgtgttcggtatcctgctgggtgtgctcacaggactgttcaggattttcggcggctccgcagagggcgtgtcctatgcaattatcatcagcaacatccttgttccgctgattgagaaagtaacccttcccaaagcatttggaaaggagggcaagtaattatgaataaagcaggatttatgaaagacgcgctgattcttttcgtcatcacactggtatccggctgcctgcttggcggtgtgtaccaggtgactaaggaacccattgagaaggctaccattgctgccaacaacaaggcttacaaggcagtatttaacgaggccgagtcatttgacccggatgatgccctgacagccgcggttgagggatgcaacgcagacctggccggcatggattttggcggcgtcaaggtggagaatgtgcttaaggcagtagacggcagcggcaaccagctgggctatgtcatcacttccctttccaatgacagttacggcggcgctgtgaaggtatccgtgggcattaaagaagacggcaccatcacaggaatcgagttcctggaaatcaatgatacgccaggtctgggacttaaggccaaggagcctaaattcaaagaccagttcatcggcaagaatgccgaatccttaagtgtaaccaagatggggaacgcggacgacacccagattaacgcaatcagcggtgccaccattacttccagcgcaacaaccaacgcagtgaatgcagctttatattacctgcataactgcatcaaataattaggaggtgggaatatgaataactgttctgaacgtttatataacggtattgtgaaagaaaaccctaccttcgtcctgatgcttggtatgtgtccgaccctggccgtaaccacatcagctgtcaacggccttggtatgggactttccacaaccgtggttttactgttttccaatatgattatatcagcactccgtaagattataccggaccgtgtgcgtatcccggcatacatcgttatcgtggcttccctggttactgttgtgcagctgctgcttcaggcctatgtgccgagcctgtattctgcccttggtatctatattccgctgattgtagttaactgtatcattcttggccgcgcagagtcctacgcatccaagaacggcccgcttgtatccacctttgacggtatcggcatgggcctgggctttacccttgcccttacatgcatcggccttgtccgcgagatcctcggttccggcgcaattttcggcaatgtagtgattcctgaggattaccacatcgccatctttgttctggctcccggcgcgttctttgtccttgcagtgctgaccgcccttcagaacaagttcaaggccccgtcagcgaccaacggttccgttcccaagtccaggctggcatgcggcggcaactgtatggaatgcacgggttcctcctgcatgtccaaccatgaagtgctggagaccaggaaacgccaggcggaagagaaggcccttgctgcaaagaaggaagccgtagcaaagaaggaagcagagttaaaagcagctacttccaagaaagaaaattaggagggtggatagatgaaagagttattgttaattgccattggttccgctctggttaataacgttgttttgagccagttcttaggactttgtccattcctcggtgtttcaaagaaggttgagacttcagccggtatgggtgcagcggttattttcgttattaccattgcgtccgctgtgaccagcctggtgtacacagggattcttgtgaatctgcatctggaatatctccagaccattgtattcatcctggttatcgcagccctggttcagttcgtggagatgttcttaaagaaatccatgccgtcactgtatgaggctctgggcgtatacctgcctctgattaccaccaactgtgcggttctgggcgttgcccttaccaatgtgacgaagtcctataacttcgtacagagcgttgtaaacggtatcggtatctccgttggttttaccattgctattgtcatgttagctggtgtccgcgagaagattgagcataatgacgtcccatattcattccaggggtcacctatagtccttattacctcgggtcttatggcaatcgcatttttcggattttccggattaatttagaaggaggagaaggaaaatggttacaggtattataatagcggcagccgtggtaggtatccttggtattctgataggtgtcttcttaggcatagccagcgagaagtttaaagttgaagtagatgaaaaggaaatcctggtccgtaacgagctgcccggcaacaactgcggcggctgcgggtacgcgggctgtgacgcactggcaaaggcaatcgcagccggccaggcggacgtaggcgcatgtcctgtgggcggcgcttccaccgcagagaaaatcggagccatcatgggcgttgcaggcggagccgccgagaagaaggtagccttcgtgaaatgtaaaggttcatgtgacaagaccgccgtacagtataactattacggtgtggatgactgtaagaaggtatctgttgtcccgggcgccggggagaaggcctgcgcatacggatgtatgggctacggctcctgtgtcagggcatgcgcctttgacgccatccatgtggtggacggcgtggcggtggtggacaaggagaaatgtgttgcctgcggcaagtgcgtggcttcctgtccaaaccacctgattgagttggtgccgtataaggcagagcatctggtacagtgcagctcccacgacaaaggcaaggatgttaaggctgtctgcgcagccggctgtatcggatgtaccctgtgtacaaagcagtgtgagtttgatgccatccatatggagaacaatctggctgtcattgactacgagaagtgtaccaactgcggcaagtgcgcagaaaaatgtcctgtcaaggttattgtttagacgagataaaaatatcggaatgaaataaaaagctgtcccttccgcgtgatgaaccgcggaagggacagcttttttgctgcatttgtatgttattttttctttctctttttaaaagccggtgaatcaaaggactggtcgtcaggcaggaccttcttagtggtggcctccaccagattgtcgtagcaggaaaagatggcgcttatgtccctggagtccattcctggtgtcagaagggatacaagaggaacaataatgagtcctacaatcattgagacagcaccagcattgatgggggatgcaatatagtgcaggaacatatttgaaaccgtgataccgatgccggtggcaaagctggcccacacagccgctggcgtggttcttttccagtacaggccgtagaggaagggagccagaaaggctccggccagtgcgccccaggagatacccatgagctgggcaatgaagtcaggcggatccagggccaggacaacgcttatgacgataaaggccacaatcaggcactgcatcagcaccagctgggttttatccttcatgttctttacaaggctgcctttgataaaatccagggtcagggtggagctggaggtgagcaccagggaggaaagggtggacatggatgcggacagcaccagcatgacaacaattccaatcaacaggtccggaaggccggacagcatggccggtatgatggtatcataggccacggatccatttccattataaatggcagggctgtcaaagagccggccgaagccgcccaggaaatagctgcccccggagatgacaatggcaaacagggtggaaatcaccgtgcccgtggcaatggctttttcgcttcggatggtatagaatttgtgaatcatctggggcaggccccaggttccaagggaggtgagaatcaccacgcccagcaggttcaggggatccggtccaaaaaaggaagtgtaggctccgggctggcccagggtaaccgggacctcgctgggaatctgcgccagtctgcccacagcagccgtaaagcctccctggccgcttaaaacgctgagaatgatggcggcgatgccggccagcatgatgatgccctggatgaaatcattgatggctgtggccatataaccgcccaggatgacatagaccgctgtcaggatagccatgcccatgacacagacactgtagggaatatcaaaggccatgccgaataaccgggacagaccattgtagacagaggctgtgtagggtatgagaaagacaaatataatcagggaggcaacaatcttcatgccctggctgtggaaccggctgccgaagaattccggcatggtggccgaggagagatgcttgctcatgactctggtccgccgtcccaggatgacccaggccagcaggctgccgatcagggcattgccaatgcctatccaggtggaggccaggccgtatttccatccgaactgaccggcataaccgataaataccacagcggaaaagtaggaggtgccataggcaaaggcggtgagccagggccccacaccccgtcctcccagaacaaagtcattgacattggtggcatggcggcgggaatagaatcccactcccagcatgatggcaaaaaagataaccagcatcagcagtttaacagtcatttgaatatcctccgcatacactttaataattaaaacttctgaactttaatgtatcaaagtacaaggggattgtcaaagggtatttcttatttttgcctactttggctattttgacggaacttcgtgaaagagaatgaggtgcaaaatgccatttttttgttaaagtgggggataactgtcaaatttcgacaataaatgtaaaatccaaagatggatataaaatgtaaaaaatgaataattaaggtataaaaagatttacataatataaattacaaaaataggaaatcatgtaacatgtttaaaaattaataatactgtaacataaatgtaaagatatggctggcgaaatgcacaaaataaaggtgcagacacctggaaaaccatagtaaatatataaaaaatattacaaatgtttcaaaagtaagaaaaaatgtaacaaaattattaaatctccattgacgcgaaaagtcaaatcccatataattagccatacatcccggaaaaacatgcacaaagtgggagatacccactgcataaaattttgagaatggtacctgtacagagttgtgcggggccaggaaagaggagtatgtatgcttacattacattcattccttcgttcggtagttctctttgttaagtcactgactgtgaaagtgacaaagcagatgtaccgttcctcatcggtggtgatggcgggtatgatggtagtggccatcatagcattttcagccaatgggtttggcggcgggggaagaaacgccctggcagcgcccatgacggaggaaagtgacgccattgacatggcggaggaggaaaacgaaggaagcggtctggttactgaagcaaaagtacaattcggacatttaaacacagacagtgaaggccagcatctggccggtgcgctgctggaagcggacgtccgagagaaacagagaaagcaggcagctgcacagacccagattgagacacttcagaaacagatattaaaggagagacaggaagaggaggccaggaaaaaggcggaggaagagcgccgggcagccagaaggattaaatatacggatgaagattaccaggtactcctgcgcattgtccaggcggaagcgggaatctgcgaccccaagggaaagatactggttgcggatgtgatcattaaccgtgtcctgtcgggaaaattcccggacagcgtaaaggcagttgtataccagccatcccagtttcagccggtatccaacggcaccatcaacacggtaaaggtcacagcggaaaccattgaatgcgtggaccgtgccctggccggtgaagattattccaacggagccctgtattttatgaacagaagggcatccggcagtgctgcctcctggttcgacaggcggctgacctacctttttgcccatgacggacatgagttcttccgataatcagataaaaaaggattgagtttcctgcggctttaggtgtatactaggaattggaaaatcgaaatgccacaaaggagaatggaatatgatttttgatgagaagaagaacctggacttttacaggaatttagggattgaaggcagatatgccaaggccgtggatttccttcagaatacggaccttgaggcattggagccgggaaagtatgagattgacggcaaaaacgtgtatgccaatgtaacagcctacaccaccatcccgtgggaggaggctaaatatgaggcacatgagcattacaccgatatccagtacgtgattgagggcagcgagattatgagctacgcgccggtacatgagatgactgtaaaggttccatataatccggataaggatgtggtattctttgagaacaccacccccggacttagggttgtgaccggagccggacagtatctgatttttaacccatgggatgcccataagccaaaggctgccaacggagagccggcaccgattaaaaaggtgattgtaaaaatcaaagaggattaaaaaataaattaaatgcgaaataaaacgtgaatgaagcgtgattttaagaaagcgcaggaaaaaaggccggcccgctgtatccggtatcagcgggccggtcctttttatgcccccggagactacctcatgtttgctgatatttcattgctaatattttgttaattgaaatattgacttttaattcacaaaatgagataatgaaaaggatttcgataaaatgaaagagaggtaaatgaatgatggcaaatgtagatttgagtcagtatggtattaccggaaccacagaaattgtttataatccttcctatgagatgttatttgaagaagagactaaaccaactctggaggggtatgaaaaaggccaggtaagcgaacttggtgcagtgaatgtcatgactggtatttacacaggtcgttcccctaaggacaagttcattgtcatggatgagaactcaaaggacactgtatggtggacaacggacgagtacaagaatgacaatcatccggccagccaggaagcatgggatacagtaaagaagattgccctggaagaactttctaacaagagactgtttgttgtagacgcattctgtggagcaaacaaggatacccgcatggcaatccgcttcattgttgaggttgcgtggcaggctcatttcgtaaaaaacatgtttatccagccaagcgcagaggaactggagaactttaagccggatttcgttgtatataatgcttccaaggcaaaggtggaaaattacaaggagttaggcctgaactccgagacagccgctatgttcaatattaccagccgcgagcaggtaatcgtgaacacatggtacggcggagagatgaaaaaaggcatgttctcaatgatgaactactatctgcctctgaagggcattgcatccatgcattgttctgccaacacagatatgaacggtgagaacaccgcaatcttcttcggactttccggaacaggaaaaaccactctttcaacagaccccaagcgtcttcttatcggtgatgacgagcacggctgggatgacaacggcgtatttaacttcgagggcggatgctatgcaaaggtcatcaacctggataaggattctgagccggacatctacaatgcaatcagacgcaatgctcttttagagaatgttacacttgatgctgacggcaagattgattttgatgacaagagcgtaactgagaatacacgtgtatcttatccgattgatcatattgagaagattgttcgtccggtatcagctgctcctgctgcaaaggatgttattttcctgtcagcagatgcgttcggcgtactgcctccagtatccgttctgactccggagcagacacagtactatttcctgtccggatttacagcaaagcttgccggtacagagcgtggcatcacagagcccacacctacattctcagcctgcttcggacaggcattcctggaactgcatccaaccaagtatgcagaggagcttgttaagagaatggagaagagcggcgcaaaggcatacctggttaacaccggctggaatggaacaggcaagcgtatctctatccgcgatacccgtggtatcattgatgcgattcttgacggctccattgcaaaggctccaaccaagcagcttccattcttcaactttgagattcctaccgagcttccaggcgtagatcctaagattctggatccccgcgatacatacgcagaggtatcacagtgggaggaaaaggcaaaagatctggcacagcgttttgtcaagaactttgcaaaatatgagggcaacgaggctggaaaggcactggtttccgctggtcctcagttataatcataaaaatcatctttctgccccgcggcagaaggacagcatgatagagggagaaccggatgtccggttctccttttcatacagtccaggtgcccaatgactttccctggagctgacatttcttaatattttatactgtttcttaagtctcatttacgtccattgaaaggctgtttttttcatgataccatgaaaccataaaggaggatgggttatgaaaaaatggaaaaagaagcgtacatggacgctggcaatgacgctggttcttctggcactgctctctctgtctgcctgcggcagcaagctgtccaatacggcagccacggctgagaccatggctgcaggatatgctatggatgtgagggaagcagcgataaccatggcccctgcgggagaagacctgaatgggttaaaggctgagagcggaagcggtctgtcaccctcgccggacatcggaagtccgggggaagcaggcaggaagctgatacgggatgtgagtatgaacgtggaggccagggactttgacggcgtcctctcccagattacagatcaggtaggggagctgggcggttatgtggaatcctctgatgtgtcgggagtcagcgtcgattcctatggcggcagccagcagcgccatgcggacatcagggccaggattccggccgaccggctggaccgctttgtagagacggtggagagcgcgggaaatgtgaccagcaagcaggagcaggtgacggatgtgaccctgcagtattcggatacggagagccgcaagaaatcgctggagatagagcaggaacggctttgggccttgctggaaaaagcggagtccctggatgcggtggtggctctggaggcccggctctcagagatccgctatgagctggagtcctacacatcccagctgcgcctctatgacaatcaggtggattacagcactgtatccatctatatgagggaggtaaaggaccttacccccactgcgccggacagcattggaaccaggattcagaagggctttaaccgcagtctgaataaccttggggaggccgtaactgacctgattgtatggcttgccgtcaacagtcccatcctgttcgtactggctgttatcattggggcggttgtccttattgtcagaaggctgagccgaaagctgcggggcgggaaccgatccccaaggcgtttctctccattccgcggcaagcccatgggaggaaagaagggcgcaaaggaccagaaggagcaggcggagaaaggacagccggagaaagaaccgccggagaaagaaccgccggagagggaacaggcggagaaagaacagaattaagataaaaaccaatatggagggcaggacacacagccggcaaaaacaggcttgtgtcctgcctttttatggcgtatactcatagtaataatccacagcaataatctgaggatgcctgaaaccgtgttcccgccggattcaggaaatccggcagatttcccgttgcctgtcaacaccatatatacccagggaaaggagaacctcatgcagcttacctatctgcacatccacaattttaagtctatacgaagcatggaaagccgggatatagaacgggcgctgattttagttgggaaaaataatacaggaaaaacctcggtgctggatgcaatctgtgcggtgtgcggctgttatgagattcaggacagggattttaatgagaaccgtcaggctatccggattgatgcctgcttttccatagaggaggaggatctgcacctgtttcaccatatgggtattgtcagccagtacagacgttacgatgtgtggcgcagggtattttctgagcggcttccgtcgttccaaaacggagagctgtcctttacctttcacgtgaaccaggacggcaaggtgcggtacgaggatctttataggaagaataacccctatatccatatggtgatgccccgcatctaccgcatcaatgcggagcgggagctgaaccagctgcagaacgaccttctgatgttccaggaggacgaggagcttcgaaggctgcgatccggcagctgtatttttgagcgggctaagaaatgcaaccattgtttccagtgcatcggcctgattaataagaagaaaccggaagaactttccgcctttgagacggccagacttctggagtttaagatataccagatgaacctgagcggattttccggaaaggtcaatgaaaatttctttaaaaatggaggatacgaggagatacagtacacgttaagctgcgatgcggaccagctttttaccgtggaggtaacggcccataaccgccagagaggtactgtgaagccggtggagctgatgggaaagggcatgcggagtatttatatgctttccctgctagagacctatatcagcgaacagggccggattcccagcattattgtggtggaggatccggagatattcctccatccccagcttcagaaaacatgcagtgagatactgtaccggctgtccaagaaaaatcaggtcattttcaagactcacagcccggaccttttgtttaatttcagcatacgccagatacggcaggtggtgttggatgatgagcggtactcggttgtacgcccgcggaccaacatgagcgagatattggatgacctggggtatggggccaatgatctgctgaatgtcagcttcgtgtttattgtggaggggaaacaggacaaaagccgcctgcctttgcttctggaaaagtattattctgagatttatgatgaggaaggaaatctgtaccgcatatccatcatcaccacaaacagctgcacaaacatcaagacatatgccaacttaaagtatatgaaccaggtctatctgcgggatcagttccttatgatacgcgatggagacggcaaggatccggaggagctggcgtcgcagctgtgcaggtattacgatgagaggaatctggaggacgtggaccgcctgccgaaggtgacaaggaagaacgtgcttattttaaagtattattcgtttgagaactatttctttaacccggcagttatggcccgcctgggaatcgtggaaagcgaggatgatttttaccggaccctctatggcaaatggagggaatatctgtaccggattcgcagcgggcagcagctgatggaagtcctgggacgggatttctcatccccggaagatatgaaggagcacatggaagaggtgcgcacctttctcagaggccataatttatatgatatattttacggcccgttcagggacagggaaaaagagattctgagggcctacatcgacctggcgcccaaggaggattttaaggatatactggatgccattgaccggtttgtctattttgacagcaggaaaagacctgaggatgaaaggcaggcagagaagagtatgatgtaaaaaggacataacagaaagaggatataacagaaaaaggggcgctgcccatggccggataagtccggccggggcagcgcccttttatcgctttcttatatgaagagcgattcaaacgttcccttaaaccccataaggttcttcaaccgcaggactgtctgcgttctttcccttgcccatcacgcaggtgaacacaaaggttcccaggcacactgctgcaaagatgatgccggcaggataggcgatggcggtggagagctggaagccttcctttgccatcaggatataggtacaggatacagccgacatgaaggtggccggaagggcggtgagccagtagaagcgttttctgcggaacagatatacgcttgcggcccacagggcgatcatagccagtgtctggttgctccaggagaaatatctccataccacctgtacatccacctgggtcagaacagcgcccacggccagcagcggaacagttaaggcaagacggtttttgatgggtttctggtcaatcttgaaccagtctgccagggtcagtcttgcactgcggtaagcagtatctgctgaggaaatggggcaggcgataacaccaatcatggcgatgacagcacctaccggtcccagaagcttgaagcagatttcatacacaacgctggactgtccgttgccaagggcctctaacagaccgcctgtgccgttgtagaacgccacgcctgcggcagcccagataagggcgatgacgccttctgccaccatggctccgtagaacaccttgcggccgtccttttcattggtaagacaccgtgccatcagaggagactgtgttgcatggaagccggagatggcgccgcaggcaacggagataaacatggtgggccatataggagtgcctgaaggatgcaggttggacagggtgatttcaggaatgtgataaccgcccaggataatggctcctcctacgcccagggccatgacgatgaggcagataccgaatatcggataaatcttgccgattaccttgtcgatgggaacaaaggttgcgatgaaataataaatcaagaccactgccagccagaatttggcatccaatacattaggggtcagcatggcaagcaggttggccggtcctgtggagaagcttacgcctaccagtaccagaaggactacggagaatacacgcatgacctgtttcatggcattgcccagatatgtacctgtgagctcggatacgctggcgcccttgtggcgcatggacatcatgcccaccatgtagtcatggacacctccgcctaacaaggtaccgaaggtaatccacaggaatacgctggggccccagcaggcaccggccagcgctccgaaaataggtcccagaccggcaatgtttaacagctgaatcaggaatatacggggagtgcccatgggcacatagtcacttccgtctgtcatggacagtgccggcggctttctgtcatcagggccaaatactttctcggcaaccttactgtagagcataaatccgataatcaaaattgccagacatacaaaaaaactaatcatatacctacctcctatgtatttcttgtatttgtaataattatacaataataggagtgaaagtgaatgttttttgtatcaactgtatgaaggagtgaacaaacagtaaaataaagttcataaacggaaggcaaaatggcccataaatcatgtatggggggattataccccgatgatctggcgcagcatttttgacttttccctgctcacaggaaggatattcttctcaaatccctgcatttttacagccagactgttgttggcccagggaaagagttcggtgatgaagctgagattcaccagatagcttttgtgtatgcggcagaaaccatggggagccaggcgtttctcgtactcccctaaaagaaggttttccgtgtagtcccgggtgggggtatggatgatgcagcttctccctgaagtttctatgtatacaatctgctgtatatccaccagtataatggtccggttcatattgatgggcatacggctggctggaaaggcggctgtgaccggatctcccgcctcctgctgggaggcgtataaagaggatgaagccggcctgcaggactcgccccagggctggtgatcgtcgcaggagcagacagcagaagcggtaagggcctggtttttctgcaggtccttttgacatttttccaggacacggcgcacccggtccgggtcaaagggtttcagtatgtagttgtttacgcccagctcaaaggccttgactccatactgggagtaggcggtggcaaacacaatctgggcatcggggagaatccgcctggcggctgccgccagagtggtgccatccatatcccccaggctgatatccacgaacagcaggtcaaaggtccggcggctgataagttcaatggcagaggcgccgctgtcagcctcctcaatctggctgtccggcatggcgtccataatctggtggaccagttcctttctggccggacgttcatcgtcaatcacagctatcttcattgtatgattcctcctgtttgatttcatgggatgggacaggaatttcttccggttccaaagggattcggaaccagactctggaaccggcttctgaagtctcgattttcagaccgttatcttctccatatatgcttttcaggcgtttgtgcacattggacaggccaactccctttccctggccagtgtaaagtcccagcaccacttccctggggataccctgaccgcggtcagccactgagatttccgccatgccttccacactgtggacgctgatggaaacatggcgggcgccggtcctgtccccgccgtggcggaccgcgttttctaccaggggctggaggatgaaggagggaaccttgcagttgaggtcgtcctccacatccagctccacaaccagtttttcctcaaaccgcgcctgctccagttccaggtaactggccacatggtacagttctgtgtgaaggctcagcatgtactggtcgttttccagggcctggcggtagtaggaggagagggttagaatcagttccctggcccggtccggattctcccggcaaacgcatgaaatggtgttcagcgcattgtaaaggaagtggggattcacctgggactgaagggccttgaactccgctttgcggcggagctgtttctgataatccaggtcggacagctctaactgggtggagaaaagacgggccagctccgaggcaaagtccagatttgactgggaggtatgccagtgtttctttaccatcatggtcagactccccactggtttgtccatctcgatgagaggggcggcaacaatgatgtggttcttcaggatatggtacagggggtctgtcttttccgcataggaaaaggtggtgggcttcctgtcgtggatagagcttagaatgggcttcagcacagcttcatcccggaggacatcgtaccagttctcacccttcatggccaggattttctgggcatccgtgatcatcacagccgcacaggaagtggactggtaaatgatgtctgcggtggcctccatatccgcggtgctgtagagtccctttctcaggtgaggcagactctggtccacaattcccatggccagacgcatcttctccgcgaactggctgtcctcctccatgaataccatattaaaggtgcccagaaatacaaccatgcccagggcattcatgattatcatgggaaaggcaatgaggcgtaccaggtccagggcagcagggaagggccgggagatgagaaggataatggccatctgcccaatctcagccagagccgtgatgagaaataccccggcaccgtcaatcttgccggccttaaaccgcttggaaaaggcggaaccgatcaggccctccacaaaggtggagacagcgcagcttacggcggtaaatcctccgatatcaaagagataccggtgaagtcctcctatgacggcggctccgattcccacataggggccgcctaacagacctgctgccagcacgccgataaccctggtgttcacgatagcgccctgggcacgcacccctgtgtaggtggagaaaatgctgaccagtccgaatatgactgccagggcggccctgcttcccatggcatggctgtcctccagcagcatggagcgaaccatggggagcttggtgagcatggtggcaatgagtaccagaagaccaatatttaaaagcaggttaaaaaacatggtattggacatgatgacctcccttaatcgttctcacaccagtataccaaaaaatcaatcttaagaaaatctttaattgtaaatcttggaagactatggtaatctaatggggaagataactgtattaatatacttaatacagatgggacaccgggaggagcgggatatacctggtccatgacatggcgggggcattgctgaggccgctgtcaggcatcccggcagcgagaacagagagggggaaggacgggatgattgtactggattacagggacagcaggccgctgtatgagcaggtggcggagcggcttagggaactgatgtttaagggtgccctgccgcaggatgcgcagctgccgtctgtgcgcagccttgccacggagctgtccatcaatcccaataccatccagagggcgtatacggagctggaacgccagggatatatttattccatcaaaggcaagggcagctttgtcgcggataacagccggatgaaggcgggaatccttcaggagtggaaggggcattttaactctgctgtggaggaaggcataaaggtaggcgtcacagcaggagagatgaaggaaatgattgatacggcctgccggaatcatgccatggaaaggggagagagtaatgattgaagcagtgaacctgacaaagcggtttgacgatatcgtggcagtggaccatataagcgccaccattcgggatggcagcgtgttcgggctaattggtaccaacggagccggaaagtccacatttttaaggctggccagcggtgtgctgaagcctgaccagggatgcataaccattgacgggcatgaagtttttgagaatatcccggcaaaaaagcgctttttctatatatcggatgaacagtacttctttaataataccactcctgtggagatgatgcgttattacagtaaggtgtaccagggatttgacgaggcgcgtttccacaagctgatgggaaatttcggcctggacgagaagcggaagatacacaccttttcaaagggaatgaagaaacaggtatctgttatctgcggtgtttgcgcgggcacggactacctattctgcgatgagacctttgatgggctggatccggtgatgcgccaggcggtaaagagcatatttgcagcggatatggaggacaggaacctgactcccattattgcttcccataacctgagggagctggaggacatatgcgatcatgtgggactgcttcacaagggcggcattctcctgtcaaaggacctggacgacatgaagcttaacatccacaaaatacagtgcgtccttaaaccggatatgaagccggaggacctgacgtcccttgataaggtaaatgtggaacagaggggaagtctctgcaccattacggtgcggggaagccggagcgaggtagaggccgttatggcttcctatgagccggtattctttgagtgcatcccactgtccctggaggaaatattcatcagtgaaacggaggtggctggttatgacatcaggaagcttatactttaagctgctaaaggaggatttcaggagaaggctgtgggccattgccctggtttttctggcatttttcttcactcttcccattgggctggccctgaacatggagaacgcagccaacaccaattactacaggtacaatgattatgaaccttttatccaggacgccgccatgaccgaccttcagtacaagacaaggcttctggaactgaagacagaggtggtattaaatggtgtggaatacgggaacggcatgattgcctttttgatgataaccgcggcagtggtcatcggcgtatccagctttgcctatctgcataataagaaaaaagtggatttttaccacagtattccggtgaggcgggaggcgctgtttggggtccagttctcaggaggcatatttattgtcggcgctgcctatggtctgaacctgctgctgcttaccggggtggccatgtcctacggcgtgcctgcgggcaggatactgggcgccatggccggtggctgggctcttaacatgctgtattacgccctcatgtattcaactgctgtggcagccatgatgatgacgggaaatattgtggtaggcgttttgggaacaggcgttttcttttttctgctgcccgggattatgctgcttctgtgttggtactgcggaacctttttcgtcactacggccagatatctgtggagttcggatcagtcgccttttatgtggggggtcaggtacctgtctccattcagcgtatacatcaattcctttggctggaagatgaacgaactgtcaaaacatgttccggagctcatctgtacggtactggcatttttggcagttaccacactggatttggggctgtaccgcaaacgtccgtcagaagcagctgggaaagctatggcatttaagaaatccatgccgcctatccgtatactgctggtgctgggaattggtctggccggaggcatgttcttctggtcgctgcagagcaggctgcgctggggactgttcggaaccatagtatcagtggtgctgacccactgcatcgtggaaattatctatcattttgattttaagaagatgttcagtcacagactgcagctgggactgtgccttgcagctggaatcctggtattcttaagcttccggtatgactggtacggctacgattcctatattccgtccaaggaaaaggtcgtatccgccagcctggatatcagtgtggacagcagatggctctcggataagacctttgagacaggcagtgacggaaagctgcagatacgttatgcagacccatatgaatatatagaagaaaacatggtgctcaccgataaagaggctgttatgtccatggtggaagagggaaggaagcgcgccctcgagagaagggatgagcggctgggcatacgcaaggcagtggcccgggttgacggctatcataccaatgcagccagttccatcagctatatcggcggggcggacggccccacctccatctttttagcaatgaagtcaggcggaggggaggattcggaccaggagaaatttgagaccaatatgacggtatgctaccgcctggcaaacggccgtgaggtgagacgttcctattccctgcctctgtctgccgtgatggattcctatgaggcattgtacagacaggatgcttataaggaaggcatgtacaggattttaagccaggaaccgggacaggtaaaacagattatgtacagggaggcggaccaggtcacggatgtgagccaggacagccgtgtccaggaggccgtgctaaaggcgtatcagcaggatatgagggagctgaccgtggaggagcggctggtggagatgcctgtgggcagccttatgttcatgacagaccaggagaatacctatctccagcagcagcgccaggcagccaggtcgtcatttggcggcatagcgcggtatcaggtggaggatgtgagccagtactggccggtgtacccatcctttgagcggaccattacgctattgaaggagcagggaatagaacccggcacatgtctggcgcctgagaaggtggagcgcatcgccattgacgtgcagaattatttttatgaacagcagggagaactgccggagggagagaccctggcagaacttcagaaaatcaatcccaactaccaggaggacggttctctgatatttgaggattcccataccatcggtctgctgctggaagccattgcagaagatgaaagcagcggcatgaattatctttgcgagacagtggagggaggcccccactgtaccataaggacagagaaagaagcaggagtgggaggcttgcttataaagaacagaatcactcctgagatagcggaactctttaccggtatacccatgaataacgggaagtagacggtcagaagaggacttaacacaaaaacagggaatcaaccacgttatggtgattggttccctgtttttgttattgcggcactatctgtccggcaccgctgcatcccgtttaaacacatcgctttaggaggaacatcccccgcatccgctgcatccgccttttggttcccgaacagtgccgaaaacctgttcatgaagacgccttcccgtaggggtggcagccaggccgccctcggccgtctcctttaaggtggaagacatggcgtcgcccaccttcttcatggtccagatgacttcatccgcaggtatggcgctttcgatgccggccagagccagctccgccgccacaaaagcacctgccacgccggaagcattgcgcttgatacagggaatctccaccagcccggctaccggatcgcatacaagtcccagtatattcttgatggcaatggcgatggcatgttccgccattttcggggtaccgcctgccagctccacgatggcagcggcagccatggcggcggcagagccgcattcagcctgacatccgccctgggcgcctgccagggaggcattgttggcaatgaccatgcccacggcagacgcggtgaacagggacatgacacagtctctttccggaatctgtttttctgcctgcatggtcagcagggcggcgggcaggatgccgcagcttccagctgtgggggcagccacaatccgtcccatggcagcgttgagttccgagacagccagggcgcggtacagggcaccggagagaaaggagccggtcaggctctttccgttttcagatatccggcgcatcttataggcgctgccgccggtcagcccgctggtactttttaggtctttattgcagccgggatcaatgcactctgtcatgacctggtaatttttccgcatatgttcatatactgattcctctgtctgctccatctgttccgcctgctgcctcagtacgatggcagagatgggaagaccgcttttttcggcggcagctacgatggatgccacggaagagtaattgaattcaggttccataaatataattcctcctgtaattatgggtttcatcagctatatgggctgaagcatggtgctggagaaaatgttgggcagcactttgattttctcgttcagttccggtccgaaactgccgtcaatttcaatggtcatcacggcttcgccgccccggctctgcctggacaggcggaagttgcagatatttaccccggcgtctgccatgacttccgtgacagccgcaatggtgccgggcgcgtcgcggtggagcacaatcagggttgtgtgctggccggtgatggatacctccatgccgttgacttccttgacaagtatattgccgccgccgatgctgcttcccaaaagagagactgtgttgcctgtaacgtcggtcagggtgaccctggccgtattgggatgggccccgtcgatttcgcctgtggtaatgcttacttccagaccctgttcccgtgctaactccggcgccctgcgtatacggctgtcgtctgtggccatgcccatgataccggcaatcagggccttgtccgtgccgtggcccttataggtctttgcaaaagagccgtgaaggaaaatgtctgccttcacggccggcgctcccaacagagccagggttatcctgccgattctggcagcccctgccgtgtgggaactggaagggcctatcatcaccggccccaggatatcaaatacattcatgatattccgcctttctgttattctttatcagtattatttgtcaggctatgataagctttgccccggccccccggatccggctttccatctgaggggagatgccggagtctgtcacgatggtatctacctcctcaaagggacaaattttgagcaggctggcctttccgaacttggtggagtcagccaggacaatggtacgggtggcagaacggtgcatctggttctgtatccgtatctcgctcagcctctggtccgtacatccgatgacagggtcaatgcctgtcacggtcatgaacatgatgtcgatatgaatgctttccagcgtggaggagaattcattgaccagggtatactcatcccggttcagaataccgcctgtgagaatgatggtaatgccgggattctcagccagcatcagggcgttctggatggagttggtcacaacggtaaggttgcggaaccgttcctttaatacaagcgccatcatctggctggtgcttccgtaatccagggcaatcacctgtccttcgcttaccaggccggctgcctttgatgtgatggcagctttttgctccaggttctgggagttgcggatctgaagggaaatgtatccccccggaatatccgctggttttccggaatccgcagggacagcccctccgtgtaccctggacaggcgtccctggctgtccagatactccaggtccttgcggatggtttctgaggaaacgcccatcagcttcaccagttcggctgtatgtacaattccgtctttatctaaaagctccagaatctttgtatatcgctgttttgccagcatatgttttagccctcccttctgatgcttttcttaacataagtcattcacaatttattatatcccaaaatcccaaaatggaaaagtgaaaagtgcaataattcccaagctaatcccaataacgcttcactgcggcggagaaaaaagattgcgaaaaacttgggtttaatacgaccgatttcattataaccaacatattcgcaattttatagatgcgaaatgcacaaaaagccaacaaataatttggtataattgcgaaaaaatttgatattattgcgaattagcttgaaaacccaaccaaaagcagatatactaagtctgtagcaagatggaaatgtcttgcagggaatgagaggtaccgtttatggagtgggtaccagatacacacaacgaaaggagatttaatagatatgaataatgaaacaagagcgaaaatcgtaaaagcagcacccaaccgctggctggtgttctgtatcctcacattatcaggaggtattgcattcaagctttcgtccatgaaggacatgttctatgtacccatgcagcagtttatgggactcaccaatacccaaatcggcggcgccctaagtgcttacggcatcgtgcagaccatcggcctcattgcaggtatttacatctgcgatatgttcagtaagaaatatatgattggcggctccctgattggacttggaatcgtgggtgtatatctttccaccttccccggatactggggatttttggcagccttcggcgtaatggctattttgggtgaggttacatactggcccgtactgttaaaggccatccgtcttctgggagatgagaaaacacagggacgtatgttcgggttcctggaaatggggcgcggcgttgtggacgtcatcatcgcatcctctgcactggccatcttcaaggccatgggagaaggtgcagcggcgctgaggggcggtctcttattcttatcagcagttacggcagcagccggcgttctctgtctgatttttgttcccaatgatgaaaaacgcgtggatgaaaccggcaaggaagtcaataaggcacaggcagcctttggcggtatgatgcaggctatcaagagtgttgatatttgggctgtttctttgaatggttttacggtatactgtatttattgcggacttacatattttattcctttcctgaaccagatttacttccttccggcaacagccgtaggtatgtacggaatcatcaaccagtacggtcttaagatggtaggcggaccaatcggcggctttatgtccgataaggtgcacaaatcctctgcaaagcatatccgcgcaggctttgtggtatgtatcatcgccatggctcttttcctgatggtgcctcatgagtccctgggacagggcggcaactggataattggcgcggcgtgcacactggctttcggagccattgtatttaccatgagagccgtattctttgctccaatggatgaagtcagggttccaaaggagattacgggagcagctatgagccttgcatccctggtcatctaccttcccaatgcatttgcatatgtaatgtacggaagtttccttgacaggtatccgggcatggcaggattcaggattgtattcagcgtcatgattggatgggcggttatcggcgtgggcgtgtccacattcctgattcaccgcatcaagaagtgccaggcagcagctagggcagagtaggtctgcggactgattttgacagaaggacggtatgaatatatgaaggaatatcatggttttaaaaattgcggaaactggtataagggcaatatccacagtcataccacggtgtcggacggcatgctcaccccggagcagtctgttaagctttacaaggacaacggatatcatttcctgtgtttttcggagcatgacatatttacagactatcgggagcagttcaacacagaacaatttatcatagtgccggccgtggagagcagtgtggtgctgtaccgggcaaagggcacaagcgagcgctataagatacatcacctccacggaatactgggaacgcaggccatgcaggatgcggcccctctggggacctacggacacatgcagttcatcccccctatgaaatttttcggggagtggaccggccctgaggctgcccagaaagtggctgacatgctgagagaccacggctgtgtgaccacctataatcatcccatctggagccgcgtgacagaagaggagtttatccacacagagggcatcagctctctggagatatttaacttcaatacagtgcaggaatccaataccggctacgatgtgacatactgggacaggatgctgcgcatgggaaagaaaatcaatgcatttgccagcgacgacaaccacaatgaagggctgtttgaggattcctgcggcggctggatctgcgtgcagtctcctgaattaagccatgacggcattgtacagaattttattgacggcaattattattcatcatccggccctgagatatatgactggggcgtacgggacggcaaggtatggattgacacatccaatgtgaatcatgtaaactttgtatgcggaaatatcatcaatgacgggaccacggttctgggtgagcggtttaaggatactctgaaccatgcggaatatgccttgaagggccatgagacctatatacgtgtggaggcagtggacaaatacggccgcaccgcatggacaaatcccatttatttggaatggtaatcaggtactaaaggaggaatggaagaatgaaagagcttcagcagattcttacgacctttgacgactggctgtggggcaactggctgttgtttgtgcttcttggagtgggttttttgtatacaatcataacaggaggcatacagatacggcgttttggatacatcataagaaagacaatctgggagcccattctctcaaaaagcaaggaatccaaagaagcaggaaccatttcttccttccaggccttgtgtacggcagtggcatcctgtgtgggaagcggcaatattgtgggcgtgtccacagccgtgctggcaggcggcatgggagctatcttctggatgtgggtggctgcctttgtgggaatggctaccaaatacggcgagatcatactgggtatgctgtaccgtgaaaagaatgaagagggaaattacgtgggcggtcccatgtactatatcaaaaagggactgcatgcgccctggctggctgtgctgtgcgccttcttcatggtaacccagattatcggaggcaacttcatccagtccaacaccataagcggcgtcatgaaggagaattttggcgttccctatctcacaacaggaatcgcccttgtacttatcatctttgtgattaccctgggcgggcttaaacgtctggcccatgtggcccagaggctggttcccaccatggcgcttatctatgtggtgggcgggcttctcatcatcctggccaacatcaccaaggtaccgggcgtgttcgcggacatatttgccggagccttcggcctcagggccatggctggcggcgccatgggatccatgctgattgccatgcagaagggtgttgcaagagggctgtactccaatgaagcaggcgagggatccgcgccggttatccactctgcggcccaggtaaaccatccggtggaacagggcataacaggtgtggctgaggtattcttagacacctttgtcatctgtaccatcacaggtcttgtgctgggagtcaccggagtgctggattcaggcgcaccgggaaacgtactggccatcaatgcctttgccagcgtgtgggaacccctgcgctatgtggtggctgtctgtctcctgatgttctcgtccaccaccctgatgagccagtggtacttcgggtttgtgggtctgaactacatattcggcacaaaggtggccgataaattcaaatacgtgttcccatgcttctgcatcatcggagcattggcggagatcgaactggtgtgggtcatccaggatgtagccctgggacttctcaccataccaaacctaatcgccatggtggcgctggccccgcaggtgaggaaggctaccaaggagtattttgggagagaggcaggcggacgtggataggcgtccgcgttcccgcctctcacccactgcatatcagggcgtccgctgtcctttctccgcacaggtaagaaaaagtctctgcctgaagatatggaaaatgggatagggagggcctgctaaaattaacttataacagcattcaggcaaggcgcggtattgctttggatgcgtctttttatgggtatgccagtagtcccggcatgccatttttcttttttgcggattggttataaacggtgcagacgcagagaaacgcagcgggtgagaggaaggggaggaccacctaagcgtccgccccttaacaaccaaatccccctattgacaatctttccccataaagctacaatcatatcaacagatggaccaactagtatatgtaaaataaagtaaggtacgccgtcagggagaaagagaggacataagtatgatatcagagaaaatgaaaccattggtcaataacaattccgccatccgcgccatgtttgaggaggggaagcgtctggccgccatccacggtgcggagaatgtgtatgatttcagtctgggcaaccccaatgtgccggctccggcggaggtgaaccaggcaatctgtgatatcctgaaggaagaagagtccacctatgtccatggttatatgagcaacgcaggctatgaggatgtaaggcaggccgtggctgaatccttaaataagcgcttcggcacgcagcttcaccagaataacattctgatgacagtgggggcagccagcggcctgaatgtgattttaaagacattgctgaacccgggggatgaggtaattgcatttgctccctattttgtggagtacggcaactatgtccgtaattacgacggaaatctggtggtcatttcaccggacacaacggattttgagcctaatctggcagagtttgagcagaagattaatgaaaagaccaaggcggttatcatcaatacccccaataaccctaccggagtggtatactccctggaaacccttacaaaaatggctgacatcatgagggctaaagaaaaggaactggggacaaccattgtgctgctgtcagacgaaccttacagggaactggcttatgacggcgtggatgtgccctatgtgacgaatgtttatgacaacaccgttatctgctactcttacagcaagtctttgtccctgccgggagagcggattggttatcttgtgattcccgatgcattaaaggacagcggtgaagtgttcaatgcagcgaccattgcgaaccgtgtgctgggctgtgtcaatgccccgtccctgatgcagagagtcatcctgcgctgcctggatgccaaggtaaatctggaggcatatgacagaaacaggaacctgctctacaacggccttaaggatctgggttttgagtgcatcaagccccagggagcattttatcttttcgtaaagtcaccggaggccgatgaaaagaaattctgtgagaactgcaagaaatacaatatcctggtggttccgggaacctcctttgcatgccctggctatgtgcggatatcttactgcgtgtcctatgagcagattgaacgttcccttcctgccttcgcaaaggtggcggctgactacggccttacaaaataagcagccgcgccgggcggaatacagcaggtaagaaggaaaaattctggaggagagcagacatgagaccatgggaaatgaatatacgccgtgtagtcccctatgtaccgggggaccagccggcaggcgataagctgattaaactgaataccaacgaaaacccctatccgcctgcgccgggcgtggaacgggccttaagggaaatggacgcggaccgtctgcgcaagtatccagacccgtcttccgcagagcttgtaacggctctggcagaatattacggggtgggggaggaccaggtgtttgtgggcgttggttctgacgatgttatagccatgtccttcctgaccttttttaactcccaaaggccggtgctgtttccggacatcacctattccttttacaaggtttgggcggatctgtaccggattccctatgagacgccggcactggacggaaatatggctatccggtctctggattataaaagggaaaatgggggaattatattcccaaaccccaatgcgcccacaggcctctatatgcccctggaccaggtagaggaaattgtaagggccaaccaggatgttattgtaatcgtggatgaggcatacattgactttgcaggcccctccgccagggagctgctgcccgggtatgacaacctgctggtggtccagaccttcagcaagtcccgttccatggcaggtgtgcgcattggctttgcgctgggaagccctgcactgatcaaagccctgaatgatgttaaatatgcttataattcctatacaatgaacctgccgtcccagatcgcgggcacccaggccgtgaaggacagggcgtattttgaggagaccagggcgaaaatcatgaccaccagggagcgctccaagaaacggtttgcagaacttgggtttacattcccggattccatgacgaattttattctggtgacccatgagcgcgttccggccagggccatattcgacgcgctgaagaaagagcagatttatgtgcgctatttcaatgcgcccaggcttgacaacagccttcgggtcagcattggcacggatgaggagatggatgttttgttccggttcctggaacagtacgtgaaggagtggaagccggccgggaattcagagtaaggacagtaaggaggggccggacagccgggtgccggtaagatgaatcgcggtcagacgtatgggaaatgaatcagacgcgcgggaaatgaatcagacgtatgggaaatgaaaaggagaacggatccggggtaaaggaaagggaaaatgctccggagaacggaaaaagcagtcaggagagatggatatgatggaagaaacaggctggaagcattatcttcgccttatacttaatattgtaatcccattgacgggctggctgttaatctgcctgctgggacctaagcttttgaaatttttcatgccctttgtcatcggctgggtgattgcaatgattgctaatcccctggtgcgctttctggagcggcgggtgaagctggtgcgcaggcacagctccattgtcattgtggcggcagccctggcccttgttatcggactcttatatctgctggtgtcaaggacctttgtcctgctgcgccagttcatcatagacctgcccggcctctatgccggcattgagggagatgtggcccgcagcatggagcagctggagcatttgtttgattttatgcccgacagcatacagcagagctgggcccagtttggaaacaatctgggaagctatatgggaactgttgtggagaagattgcatctccgactgtggaggcggcgggaaccgtggccaaaagccttccggccatgctggtctacaccgtggtcactatcctgtccgcctatttctttattgtggacagggaccggattctggcagtcataaaagcccatatgccccaatgggcgggccgttacgggctgtatctgaagggggaggtgcgccatctcataggcggttatttcatggcccagtttaagattatggcagtggtgtggcttattcttacggtggggtttatcgtgttgggcgtgggttacggtccgctgtgggcgtttctcatcgcctttctggattttctgccggtctttggaacgggtacagcccttcttccatgggggcttattaagcttttggggggcgagtacgcttttgcggccggcctgctgctgatttatgtactgacccaggtgacaaggcagattgtgcagccaaagctggtgggagacagtatgggcctgccgccgcttctcacgctgtttttgctgtatctgggatttaaggcggacgggattgcgggaatgattctggccgtacccattggtctgctgtttgtgaatctgtatcattacggagcgtttaaagacattacggacagtttgtctgtccttgtgagggatatagaccggttccgccgtaaagaggaataaggtccctgccattgaggcaaaaggaataaaatcgaatcaggagaagacggagttgaaagtagagaataatctggatacagataaagtcagagggctggtgtggaggctggcatttccttccatgctggctcaatttgtgaatgtgatgtacagcatcgtggaccgtatgtacattgggaatattccggagattggcgccctggccctggccggcgtgggaatatgcggtcccgtggtcacccttatatcatcgtttgccagctggattggagtgggaggggcgcctcttatgagtatccgtctgggacagaaaaatgagagggctgccgcccagatggtggccaactgttttgcccttctgacaggaatggcccttattatcatgatagtgtcttatctgtttaaggatcagctcctggtgttctttggcgcgggcccggccatatttccctatgccaaccagtatatgagctggtatctgacaggtactgcctttgctttgatttcagccggcatgaaccagtttatcatatgccagggatttgccacggtgggcatgaaatcagtggtgctgggggctgtcagcaatattgtgctggatccggtgttcatttttgttatgaatatgggagtgaggggtgctgccattgcaaccgtgctgtcacagatggcgtcctgcatctatgtgctgctgtttctgttcgggaaacgtcctctggtgcggattacctttggcggttacaggtggaagaccatgaagcaggtgcttttggtgggcttgtccccctttttaatcattgcctcggacagcctgctcattattgttatgaacatggttataagcagctatggcggacctgagagaagcgatatgcttcttacctgcaataccattgtacagagctttatgctgattatcactatgccgctgggaggaattaccggtggaacacagaccgtcatggggtataattatggtgcgggccgtcctgacaggatacggaaggcggaaaaacatatactgcttttatcagttgcctttacaactgtcatgttcataattgcccaggcaggaccggggtattttgtcaggatatttacaagggaaatgtcctatgtacgggttacagagtgggcaatccgcatatttaccctgtgtattatccccctggctgtggaatatacggtggtggacggatttacaggcatgggtatcgcaaaggtggccatcagcctgtccatgttcagaaaatcggtctatttcctgggaatgattttgctgccccgttatttcggggtggaggctgtgttctatgccgagcctatttcggatattatggcctgtgcggctgcgtccacaacatttattatgttgagcggaaaggtgctgaaggacaatcgcaggctgttctgatggggcggcttgcggacagtcggacagaaacatacataaatggaaggaagaggaatatgaatatactggtaagcgcctgtttgctgggtgtggaatgcagatatgacggccgcggcgtgcttatgtcccaggcagaggaacttctaagcagacatcacctgattccggtatgcccggaaatcatgggcggtctggccacccccaggacaccggcggaacgaacgggttcgggagtcgttacaagggatggcgaggatgtcacggcagcgtatgaaaaaggagccggggaagtgcttaagctggcacagctttacggctgccaggcagccatactaaaggagagaagcccttcctgcggaagcgggcaggtctatgacggcacatttaccggcacccttacaaaaggggacggtgtctgcgccgcatgtctgaaggaacacgggattagagtatatggggagagccaggtggggagactgttggaagacatagaaaggtaaaggtgcatgagggaagaaagaaacaaggcagaatccgtaccagcccggagcgaggaaaggcgtccccgccgaagccgcagcagggaggctttcagacagcgtcagaaggagctggcagaaagcagggggcaggagaagcgggtacaggagaatggggggcaggagaagcgggtacaggagaagcgggtacaggagaataagctgcaggagaatcgggtacaggacaccccggggacgggcgaagacaaaacgcacggaggccagccggaaaatgacggccagggaacgtttaatacacagggaaaaggtccttttgataaattcctgagctggaaaaccgctgttctggttctgattctggccgtcgctgttctggctggaatctatgcatacaaagccctaggttaccggaatacatatttcccccatacagttattaatgggatggacgtatcagggaaaaccgtagaggaggtaaaggaactcatagcctccggcgtaaacgggtacgggcttgtacttaagctgcgggacgaggagcaggagacaatcaccggtgaaaaaatcggtcttcatacggtgtttgacggaagcctggaggaaatcattcgccagcagaatcctttccgctggcccagatatctgcttaagggaccatcttacgatataaagaccatgattgcctatgatgctgatgctctggctcagacccttggcggtctgtcctgctttgacagcagcagggccgtcctgccctcagacgcttacctgtcagactatgtgagcggccaaggatattccattgtgcctgagacagagggcaccacacttgacatggataaggtcagggcccaggtggatgaggctatatccagccttgccccggaattggacctggacgccctgggatgttataagtctccgtccatccgcaggggcaatacctctctggcagcggccagggatgccaggaaccgctatgtgaatatgactgtgacctataccttcggcagcaagacggaggtgctggacggggatgagatacatgagtggcttgtgtctgacggggaacaggtttccattgacccggaccaggccgcagcctacgtaaagagcctggcctccaaatataatacggcatacaggaagcgctcttttgccaccagctacggtcagaatgtggaggtatccggtttttacggctggaggatcaatcagtcagaggagacaagagagcttctgggcattctggaggcaggagagagtgtctccagggaacctgtatatttgcagacagcagcaagccatgacgggccggattacggcagtacctatgcagaggtaaatctgacggcccagcacctgattttttacaaggacgggcagaaggtgctggaatctgattttgtgtccggcaatgtttccagggggcatactacgccgccgggaattttttctattacatacaagcagagagacgcggtgctgaagggagagggatatgccagcccggtgaagttctggatgccttttaacggaggaattggttttcacgatgccagctggcggtccagcttcggcggttccatctataaaaacggagggtcccatggctgcgtaaatatgccctatgacaaggcaaaagagctatttgaaaatgtatatgcgggcatgcctgttatctgttatgaccttccgggaacagagagcaagaaatccagccagtcctccggcagggcgccccgggagacaacggcacctgcgcagccggcgcctgtacccacacaggccccaccggcggtcccaccgtccgttttgccggagactgtgccgtcagaaacactgccgtcagaggcagcgccgcctgaaacatcaccgcagccgtcacagccccaggtaatcatacagcccgcggaccagactacggcagcgcctgcccagacacagccgtcccccaataccgaagaagggtatggtccggccttccagacaccccagtccggctcagcagccgggccgggcgtcagctgacggaacctgcccaggaggggctgaaccacaaggaattttgcagaaggctgtggatttttcaagtgaatttattgacaaatggaaaaaaccattttataatgcctttaatgcatctagggattactcgtaaagccattattcaaaactagggaggatatggactatggtagaaaagaaagatgttaaggcaactgtaaaggcagcagcggaggcagctaagcctgcagaggctaagacagaagcaaaaccagcagctccggaaaaagtagaagcaaaggcagaggcggcagttccggtgaaggcagaagcagctcctgttgagaaggaagcaaaggcagctccggctaaaaagacaacagccaggaaaacagcggctaagacaacatccaagaaggagacagctccaaaggaagccgctaagaaggagacagctccaaaggcggaagcgaagaaagaggcagcccccaaagcggcagctaagaaagaaaccgcgaagaaggcacctgccaagaaggcagcagagacaaaggcagccgtacatttccagtttgacggcaaggaccttgtggcaaaggatgtgctggacagggctgtgaaggcatttaagaaatcacacagaggcgttgagattaagaccattgatctgtacattgtcgcaaacgaaggcgcagcctactatgtggtgaacggtgaaggcggagatgattacaagataatactgtaattcagaataaaggattgaaggatgaagtgggttgctgtatcatggatgcagcagctcatttactttatgcgcagcggacaggcatcatgtcaataaggacataaaatcaataaagatataatatcaataaggataggaaaaggacagtatggcagatttaccggtacgatttgaagagcggatgaaagtattattaggagaagaatatccggcttttgcggccagctatgataaggagagggtccagggattacggtttaacagcctcaaatttccggacaggatacggatacaggatgccgttggaagcggggaaaacagggaagcggggaaaaacggagagggcaaagaaatccgggaggccaaggcggtctgtgaggccaaggcagactgtgaggccaaggcagactgtgaggccaaagcagactgtgaggtcaaagcggtctgtgaggccgaagtaacctgggaagaggccggtgctgccgaggcagccaaacagatcggacaggagaccggatttacacttgagcggattccgtgggtgaaggaagggtattattattccggcagcagaccaggtaagcatccctatcatgaggcggggctttactatatccaggagccaagcgccatggctgtggtggaattattagaccccaggccgggagagcgtgtgctggatttgtgcgcagcgccgggaggaaaatccagccacatcgccagcaggatgaagggaagcggctttctcctgtccaatgagattcatccggccagggcaagaatcctttcccagaacatggagaggatgggggtgcgaaacgcagtggtgtccaacgaggatgcccaaagcctggccgggacatttgaccatttttttcataagattgtggtggacgcaccctgttcaggagaaggaatgttccgcaaggatgaggaagccagaagccagtggagtgaggagcatgtgaagatgtgcgccgcccgtcagggcgagatactggatcacgcggcgtctatgctggcacccggaggcagaatggtatattccacctgtacctttgccccggaggagaatgagggtacggttctggccttcctgagacgccatccggaattttgcacggaacaggtgcctgcctattctggttttacgaaaggaaagcctcagtgggccgggccggaggcggaaggctggggcctggagcggacctttcgcattatgccccacatcctggagggagagggccatttcatggctgtcttaagaaaagaaagagagccggaaactgcggtaaaagccggaaaccgggaccagctgtatctggacggcagaaagagaaaagaagtgttcagggattatgaaccctttatccgggataccctgtcagaaccggatacctttctggaaaggaaggaatacgtgctgttcggggaccagctgtatctgatgccggccgatatgccggatatgaaggggcttaagattctccggccgggtcttcatatgggcacccttaaaaagaaccgttttgagccttcccatgccctggccctgtcgctcaggaaagaggagacgcagtgtttctgggaactgtccccctccggagacagcataatccggtatctgaaaggagaagctctcagcgaggacgcaggaacacctgagggatgcctgaagggctgggtgctggtatgtaccggcggtttcagcctgggctgggccaagtatgcgaagggcatgctcaaaaaccattatcccaaggggctgcggtggaattaaaaacagtcagattccggacggaagaagctgtttcatatcttcaggcagtccggccgtgaactccatctcctttcctgtaatgggatgctcaaacctgagaagataggagtggagcggctggcggctgatataccggtaatccggacagtataagaagtctccgggaagcggatgccctatagacctcatgtggacccgtatctgatgtgtcctgcctgtttccaggctgagactcaccagagacaggtccttttcttcattgtagagcagagtacggaaatgggtgactgccctttcgcctgtttcatggtccacccggcgctcgatggtggagccctctgccctggcaatggggctgtcaaccgtgccttcctcaggtgtatgtccaagtacaatggccctgtactccctcctgattctgcgcccggccatttgttccgataagatacaggcgctgagcatatgcctggccaggaccagcagaccggtggtatccctgtccaaccggttaataacccggtaagtaaaagcctcccccttttcatggaaataccaggagacggcgttggccagggtattgtcatagtggccctgggagggatggatgggcacgcctgcatccttattgattaccagtatatcctcgtcctcatacacaatggaaagaggaagctttaccggcacaatgttcccggaatcctcctcctcaggcagcgttacctccactgtctgcccggtcttaagccggtaacctgcgtacaccgcaattccgtccactgcaagtccctgtgcggcctgaatgcgcaccgtcagccggtgggaaaatccctttgcctttaaaaactgtcccaggacaatcccgtcctctctttctccaatggtataacttataacgctccgtctcatgtccgtccctcaaatctgttttctgcatataatcccgtcaactgcacgggtaaggtgttaggtcaaatgttttttcttgctggcagcgtggtccacgatggagtccttacgcaggaagctggcccgttttacgctgtcgattccatatttgctgcggatggcatccactgccttttcaaaatcctttttcttctgaagtccggggtcgtcaaaaaggctcatctgtgagaaaccgtcatcggatatcttaccggcccgcacacccatgagccgcaggggcgtcatattccaggattccctcagcaggcggcaggaatactcataaatcacggaggtggaatccgttggttcgggtatgaccatctggtgcgactggttcctgaactcccagtcacgcagctccacgcagacattgttgcacagcacatggtccgccctcagcctggcgcctacggtttcacagagggagagcaggacctgacaggcgctttcgtagtcagatatatccctggaaagggtgatactgttgccatacgccttatttacaggttccttttcagccacagggtcatcatcaatgccgttggcgtactggcggatgaggaccgcatacttttcgcccaggtgggatttgagcacttccagattacagcatgccagctgcccgatggtatgtaaccccaggttttccatcttcctctgggcagcgcctcccacaaaaaacagctcccgtataggcaggggccacatcttatcgggcacctcccggggaaacagggtatggcatttatccggtttctcaaagtcagaggccatcttcgccagaagtttattggtggagattcctatattcacagtaaatcccagttccttccggattcgttcccggatttcattggccacctccatgggactgccaaagagatggatagtgctggtcatgtccaggaaaatctcgtcgatactgaatttctcatggtccggcgtatattcctccaaaagatccatcatgcggcgggagcatttaatgtaaaaatcaaaccgggacgggacaaccaccagatccgggcacttacgcaaggcctgaaccaggggctcacctgtggtgactccatacttcttggctaaaggagacttggccagcacgattccgtggcgggacttggcgtcccctccaaccgcagaggcaaccgttctcaaatccagggcctgcgggtctttagaaagccggtacacacattcccagcttaaaaatgctgaattcacatcaatatgaaaaataagacgctccccatgtcccatcataaaacaccggcctttctgtgttgttgtctgtttacagatatcatagcagaatatgtgttcgggggcaagaggtatatggggagaggaacgcggatgggggaggtattggcgtccgtgggagaaagggaggaggcaggtggggatacggctgcggggcaagtccggtctaaggggctgcgaatcggctaaatacaagagtaagactgcccaaactcgctccgctcaaacagctgtgcagtcttactcttaacgccgattcacaccccctaagaccgactaagcccctgtagatgcatccccacctgcctcctcccttcctcccacccactgcgttttctcatccgctgtctttccccagctgatagattaaggacgctgcccttcaagtttccgctccattgctcagattttaccattctatacacctgacattccaagctgacattctcatctgacatttctaactggcttgtttatctggcatgtctaactgtcatgtttatctggcatttcaccgtgcacttctatatcccggcgttggggatatgggcaggtgggagaaaaatacgtagtgggtgggagagcgggggaggggaaggggaatgcatctacaggggtttagaaggacttaggccctgggaatctgcgttaaggggaaagccgcacagttgtttgagcgcagcgagtttgggcggcttttcccttgtatttagcagattgccggggtcttagaccttcttaaccccgcagccgtattccccttcccctcccccgctctcccacggacgcgacccctcccccctcgcacaaatcccccatcccacattcccagtaataatcattttcctccaggaatactattaaaataaagccaaccaggcggcggcgcttatgaagcaatggatttttttgataacactgacaatatcactggtctgcacacagatgaatgcggcggcagacagttggacttcgggacctgcgacaaaagaggtacgggaagatggggatttcctgaagctgtatgcccagtctgctgtccttatggatggggatacaggcagaatattgtatgggaagggacaggatattatccggcccatggccagtaccaccaaaattatgacctgtatcctggctctggagaacggaaggggggaggatgcggtgaaggcgtcttccaatgccgcttcccagcccaaggtgcacctgggggtgcgggaaggagaggagtacaggctggaggacctgctgtatgccctgatgctggaatcctataatgacgcggctgtgatgatagcagagcatataggaggcagcgtggaagggttcgcggcaatgatgaatgaaaaggctgccggactgggctgcggggatacctattttattacgcccaatgggctggatggggtcaagacggatgaacagggaaaggaacatatccattccaccacagcctctgatttggccaggattatgcggtactgtgtgacagagtcccctgcaaaggatgaatttttaaagataacacagacacagaaccactactttacggatatggcagggaaacgctcctttaactgttataatcacaatgcgtttttgactatgatggaaggagtactgtccgggaaaacgggatttacagggggggccgggtattcttatgtgggagccatggagaatcagggaaggacctatgtgattgcccttctgggatgcggctggccgcctcacaagacgtataaatggtcggatgcgagaaagctctacacctatgggctggagcattttaagatgaaggatgtatttcaggaggaaacctttgccagggtccctgtttcagggggactgtgctggaaggagggggaaggagctattgaccaggtggagctgtccatgatgctgaatccggatgatatgcacctgatactgctgatgggagagggggaggaagtgcgggtggtaaagaaggttccttctatattaatggccccggtcagggaaggacagcaggtggggaccgtggactattacctgggtgaggtgctggtaaaaaggttccctgtttatgccatgcagggagtggagaagatgaatctgaggcgggctgcggaccgtgtgctggatctgtttctggtaaggtgagaagggggagccggccctttggtcagggcgccgggaaggggattttagagagttttagagggttttggccggaatatgccaggatttgccacattatttaatcttttcttacaaatctttgtattatgtgaagtttccgccgttcttgttgacatatgaacgcttttgtcattataataggattaatgtcataaaatagaaattcatacgaattatggatatgaatgaagatacaggagatttttacataatgaagggaaaaaagttaaaaaggggcctggcgcttgtgctgggactgatgctggccgctgaggttccggcatctgtggcaacgccttttcaaatgtttgattcctatgcatatacaggggcggccacggttaaggccacctctttgaatgtacgaagcggagcaggaaccggctattcatcagtgggcaggctggcggcgggagcggcagttaccgttatcggggaacagcgcggaacagacggcaatacatggtatcagattcaatacacaggaacgggcggagccgtgaataccggctatgtctcatccgtctatatcaggcttccggtggcctataccaaggattctaattttgaagcatatcttacctcacagggatttccggagagctacaagaacgggctcaggcagcttcatgcccaatatccgaattgggtattcaaagccaagaacacaggactggactggaatacggtcattgaaaatgagtctgtgctggggcgcaaccttgtggccacaggcagtgtttcctcctggaagtccgttgccaacggggcttacaactgggacaacagcacatggaccggattcgacggcagtaactgggtggctgcttccgaggatattatacggtattacatggaccccagaaactttttggatgagacgtatgtgttccagttcctcaaccatgaatatgatgcgaatacccagacaaaggagggattaaacagcctcatatccggctccttcctgtctgggacaacgaattccacagggacagggggaagcgatttctccagcggaccaggctcttcgacaggaggttccggttcaggcggtcccggctcctcaggcagctcctccggttcttcttccggttcctccaggggacccgggcgcagcagcacctatgaagatacacagcatggaccgggggtttccggcagttctaacggctccggggcagcagcggtctctccgggaggcagttcctccggcgggtcctccgggggcagcagcccttcaggcagcggggaagtgagcctggagtccccccatgcatccattgagcccagggagcgccatgtggtgtctaccagtgtaagtctggtggctccgggacaggacggatccggcagcagcaatggccctgtgtcctcgggacagagcggcagttccccgggtccggtggcttcacccggatcggatcaggtggtggaccagaccggcacgtcgccgggaggcggctccacaggtgcagcggctccttatgcggacattattatggccgcggccagccagtcaggggtaagcccttatgtgctggcagccatgattctccaggagcagggcaataatggtacaagccctcttatttccggttcctattccgggtatgagggatactataacttctttaacgtggaggcataccagtccggcgcaatgtccgccattgagatgggactcaggtttgcgtcccagtccggttcctacggacgtccctggaacacggtggagaaggcgatccgtggcggagcccagaattatggggataattatgtgaaagccgggcagaatacattttatctgaagaaattcaatgtccagggttccaacctttacaagcatcaatatatgagcaatatccagggagctgcctcagaggcggccaagctgtcccaggcttacacggctgatttgaaaaagacagccctggaattccatatccctgtatttaacaacatgcctgagcagccctgtgtggcgcctaccggagacggaagccccaacaacaagctgtccgggctcggggtggacggatttaatctgacgccaagctttaacagggatacccaggaatataatctgattgtggattcttccgtgtccaatattacagtcagcgcatatgtatcggattccaatgcgcgtgtggacggcgcgggtaatgtctcactgcagaacggcggaaatgatatctccattgctgtgacggcccagaacggaagcgtcaggacctataccatccatgtggtgaagcaggacggcggacccacccagggcagcggaggatcgcctgtatacggaggcggcagcagttccggcggtatagtcagtccggacggcagttccggcggcagttcgggaggcagttccggcagcagcggcggtccaggcggttcaggcggaccgggcagtccttccggaagcggcagcggaccaggcggaagcaatgttaccattgtagaagtgcagtcctgataaagggaagacattataatcagaaagtgggaaatgataatgattagacgtatgagacatgcggctgcagttctggcaatggcgtgtatgatgacagtcatgatgccggctcagatgataacagcctttgcagcaaatgcaagaatcgccttttccgatccatcggcaaccgtgggcggcaagatcaaggtgaatatgaagataaccagcagcgataacctggccaacgcggatgtgatgctgtcctatgattccaacatattggaatttgtggacggtaccaatgcggacggaggggcaggagctgtccgggtccatggggatgcaggcacgcccaatacgggtacccttgcatttacccttaatttcaatgccatagcagccgggaccagcaagattgaggtcaccagccaggagatttatgattccaactcacagattgtgacggttaaccagcagggaaattccactgtaacggtcagcgccctccagtcagcatccaaggatgcaacccttaaatccctccagatttcaccaggaagcctgacgccggccttttcaccggatgtggacacctatgcggtgacggttggtacagatgtggataaggtgattgtcagcgcggactgcacggatgagaatgccaccaaggtggtcagcggaaacgaaggcctccagatgggtgaaaaccgtgtgacatgccgtgtgacggcccaggatggcgagaccatcaaggaatatgtcattgtggtgaccaaggcagagggcggcgccagtgcggcggatgccgatgcttcttcccaggtaaggatgcggattgccgagcgcgttatcaccattcttccgcctgatcctgaggtgaaggttccggagggattcaaggagagcaccattaatatcgacggccacaaggtacagggctgggtatggggctctgaggcagagcatcagtattgtgttgtgtacggtatgaatgaggctggagaaaagggcttctaccgttatgacatgaaggacgatgagaggaccatccagcgttactttgaggatccggccatcagcggttccgtgacaaaggaagtgtacgatgagctggcccttacatacgacaagatttacgatgattacagtctccttaagatacttctgattgtgaccattgtcattgcaatcattcttctggtcatccttctggtggttgtctttaccaggagctccgggaaaaagggcggcagcagggatgaactgggtgacaagaaggacggtccgcggggaagccggggcagaaacagcaggaaggaaaaggcagaggagcctgagcttttggagaattcagaggattatcaggaatatgccggtgaggatgaataccaggactctgacgaatacgatgaatcccgggagtatgaggatgattctgtctacgatgaggactacagagaccttccggaggaggattatccggtgggcgaagaggacggggacatctatgatgaggaagaagatgattatgagccggaggaagagcctcaggtggagattccggtaaagaagccggtgaagcctgcaaggccggtccaggccccggctcatgcgccggcccgtacaccagctcatgcgccggttcagactccggagcgtacaccggcccaggcgccgtcatccaggcagaagcctcctgtgaagcaggaacagccgtctggcagaagggaagcagagcaggtgcctgcaaaaccggacggacaggatgatgattttgagatttttgatttgtaattaagtatatttgtagttaagtatatttgtaattaggtataatagaattaacagaccataaaggcagcagccgtccgggatattcccgcggctgctgccttttagttgctgccggggccgtacacgccttcaccggtccagacaatccttaatgataaaaatttattatcagaccatcacaatttataattatactttatttttgggggttgttataataataacataagccttttaatatagagtatatataaaggataaaagaataaaggaggaggcatttcatgggatacagaatggatttgaaggatgccgacaggatgtttgcaaagcttcaggaagagtatgagatatgggcgccaaaacgttttgtgggtaagggcaggtattccgacacagacctgattaagtatgccagggtggaccgggcggaggaaatcgagtacagggaaaaatcggattttccggccaaggaggtattaagtcccattacccagtctctgttctatttcacagaggatgaattcattgaaagcaaggccggttccaagaagctgcttatattcatgcggccctgcgatatccacgcgcagcatcaccaggaaaaaatttatctgaccaacggcggctatgaggatatatattataagcgcatgaacgagaaggtcaagatcgtgatgatggagtgcggcgagggctgggatacctgcttctgtgtcagcatgggaaccaacaaaaccgatgattattccatggcagtccgtttcggggaagacgggctggagttccaggtaaaggaccatgcatttgcctcctattttgagggcatggaggaatgtacttttgaaccgcagtttgcggaaaaaaatgagctgacccttactgtgccggagattccggataaggaggttctgacaaagcttaaagaccaccccatgtggaggcagtttgacggccggtgcatctcctgcggcgcctgtaccgtggcgtgcagcacctgcacctgttttaccacaacggatatcatatataatgagaaccgcaatgtaggagagcgcaagaggacttctgcttcctgccaggtaaaggatttcaccgacatggccggcggcatgagcttcagaaacagggccggggataggatgcgctataaggtgctccacaaattccacgattacaaagccaggtttaaggactaccatatgtgtgtgggctgcggacgttgtatggaccggtgtcctgagtacatatccatcgtggctacagtgaacaagatggcagacgctatcgaggaaataaaagccggtaagcaggcataggagaggggatgcagtcatgaataatatagtgaagccagtggcatgtaagatacgcgaggtaaggcgggagagccttcatgaatatacattcagggtggagacagacatccgtccgtcccacggacagttcctgcagctttccatcccaaaggtaggggaagctcccatatccgtcagctctttcggggatggctggatggatttcaccatccgttccgtgggaaaggtgacggacgagatatttgagaagcagccgggcgacattctcttcttaaggggagcctacggcaagggatggccggtggagcagtttcagggcaaacacatggtggtcattaccggaggcaccgggcttgcgccggtaaagagcatgctgaacatgttctgggagcaggaggattttgtgaagagcgtgcacctgatcagcggatttaagaatgaggacggaatcattttcaaacatgacctggaccgctggaaggagaagtttaccaccatctatgccctggatacagaccgcaaggatggctgggagacgggttttgtcacagagttcgtgtcacggataccttttaaggattttggagaagactacagcgtcgtggtggtgggaccgccgcctatgatgaagtttaccggcctggaagtgcttaagcagggcgtgccggaagaaaagatatggatgtcctttgagcgcaagatgtcatgcgccgtgggaaaatgcggacactgccgcattgatgaggtgtatgtctgtctggacgggcctgtgttcaattatacccaggccaagtatctggttgattaagagaggggtggcgaaggaatgaatcatgatattgatataaaaaaggtaagaatcaactgtttcagacagtccaaggtggcaggggagttcatgctgcagatgcgtgtgccgggagctatgattgaggcaaaacacttaaagctggtccaggacctctgcgagcgcttcggaaacggcaccttccatctgggcaccaggcagacctttgacatacccggtgtaaagtatgagaacatagaggaagtaaacaagtacatcaagtcatatatccatgatgtggatgtggagatgtgcggcgtggacatggatgtgacggattacggctaccccaccatcggcgccaggaatatcatgtcctgtatcggaaatgcccactgcatcaagggcaatgccaatacatacgagctggccagaaagattgagcgcctgatattcccatcccattaccatattaaagtggctgtggccggatgtcccaatgactgcgttaaggccaatttcaacgacttcggcatcatgggcatcaacaagcaggtttatgacattgaccgctgtattggctgcggttcctgcgtggacgcctgcaagcaccatgcaacaggcgtgctgagcctgaaccagaacggcaagattgacaaggacgcctgctgctgcgtaggctgcggcgaatgttccctgatttgtcccaccggagcatggaccaggggcgataagaagctgtaccgcgtaaccctgggagggcgtacgggcaagcagaatccaagggcaggcaagctgttccttaactgggttacggaggatgtgattctgggtatgtttgccaactggcagaagttttctgcctgggccctggattacaagccggagtatctccacggcggccaccttattgaccgtgtgggctataaggaattcgtaaaacatatctttgaaggggtggagttcaatcctgaggcaaagatggcggatgatatattctgggctgagaatgagcagcgggggaacatgcatgtaatgccgctgtctgagcataagcacgcaggcccccaggaaccggcgaaaaagaaggcataggggatttgggattatcaacagcaaagagagagttcaaacagcggggggtgtgaatacatgccctgctgtttttctgccgtttttgcgcaaagattggcggctccgtgatattttagggacagaaagggatactatacaaagtaagtacagacagcgcggaagaatatgcggacagccggaaattattagtgtacactaatttatacagtgacattttgggaaaaatgtagtatacttctaagcgaaataaattgacggatatttaacatattatggacgaaaggaagaatgaatatgtactgtgtaaagcgcatcaatgatgatttgttctgggttggcggtacagaccggaggctggccttatttgaaaacgcctatcctattccgcggggggtatcctataatgcttacctgctgctggatgagaagactgtgctgttcgacacggtggacagggcaatcacggagcagttttttgagaacatagacgcgctgttaaagggacgtgccttagattacgtggtggtgaaccacatggagccggaccactgcgccacccttggggagattgtgctgcggtatccgggcgtacaggttgtgtgcaaccctaaaacgattccgattatcaaacagttttataattttgatattgattccagggccattgtggtcaaggaaaatgataccctttgcaccggacgtcatacatttaccttcctcatggcacccatggtgcactggccggaggttatggtgacctatgataccacggacaagaccctgttctccgcagatgccttcggcaccttcggggccatgaacggcaacctgtttgcggatgaggtcaactttgagagagactggctggatgatgccagacgttattataccaatatcgtgggcaagtacggaccatctgtgcagaccctgttaaagaaggcgtccggcctggatatccataccctgtgcccgcttcacggcccggtatggcgtaaagatatcagctggtacgtggacaagtatctgacctggagcagctatgagccggaggaaaaggcggttatgattgcttacggctccatctatggaaatacagagaatgcagctaatatcctggcctgcaagctggcggagaggggaatcaggaacattgcgatgtatgacgcttcctccacccatccttccaccattatctcggaggcgttccgctgcagccacctggtgtttgcatctgccacctataacggaggcatctttagcagcatggagcatgtgcttatggatctgaaggcccataacctgcagaacaggactgtggccctgatggaaaacggatcctggggcgtgctgtcaggcaagcagatgaaggaaatcatcggcaccatgaagaatatgacggttctggaacagatggtgactgtaaaatcctcccttaaggaatcccagatggaagaactggatgccatggccgatgccattgtagactccatgaaatagcagtacccaatcagggacaatcgtgatttataacggtttgccggatggctttgtttgagccatccggtgttttattgtgttttattgtactttttgtgtatttttggttgtgaatattgcatttttttgtgaaatttagtagtatagaacatacatcccgtaatttagagcattgaaatatgggatgctcaggaaaatacaaatgatgcgagaggatatgatgacatggggattatgagactgattgaggggataagggcggggaaggcagtcagtgtgttttccggaaaccaggaatatttattttctgccggtaaaccgggccctgcctgtccggatggtttttgggaaattagcgtcagatgcaggccggaggcagtctctgaccgaaccgggccgggtaatggtccctttttatttttcgacagcagaaccaaccggtttctggattttaccgggggtcttctggaggcactgtttcccatgtcgtctgaacatatctatgatatggctgtccttgaacaggaagtgaacctgagggtgaaccggtatattactcacaatctgatatataagatacaggaaggtgcggcaaaatacgggcgggaggagtttgatgaaggagagatacgggagcaggcatatgtatgctatatgacaggggcctggggccacctccatgtgccggcccgggcttttgacatggaacagttctgccgtatggacgggcgccggtccaggacaggagaagggccgtttgtggaagcctatgcccgtctcgtaatgcttcatttaagtgaacagtttccatccggcgaagtggccagaagctttctggaggatatatgcagaaaagatacgggccgccagcgcaactacgatgtcatctgccgtgaatatgcaaaggacagctttgtggagcaggagctggaacatctgatgagggaggcaactgacagcatgaagcgggccaagagcctgtgccagctcctaaaggcaaaatgcagcgtgaagccgcaggtggagctggaccaggagatactgtcggtttcccttgcttcagactgccccggccctgttataggaaggaagcgggatctgtattactcctgacggcaacagtacggcatgtctgccaagaggtgcaggacgcatttttgggacgtgtctgcaaagggagccggccgttgacggaccagggacaggatggtacaatatggatagctataaggaatgacaggaggacaggaatcatgattagaagaaaagacgagatggagcccgtgaccaggcatgagctgcagaaggggatgggggatgtgaccttccacaccttcatgacaaaggaggaggcttatggttctggcaggacctttgcccgggttgtgtttgagccgggtacatccattgggatacatgagcatcatggggagtttgaagggtactatgttctgaaggggcaggccctggtaacggataacggcgtggaaaccgtgctgaatcccggagattaccacatgtgcaaggacggggacagccacggcattggctgttacggggatgaaaccatggaaatcattgcccttattatcaatgttccggcataagagatgccggaggagagattttgtccgggacattggacagggctgcctgctttggaaggattgtttgtatctggttcctggcaggcagctctatatttttgtctgaaacatgcattataatacattaaaaaactgtagtataatgaatattatgttgtgtttttaaaatccctgtagtaaaataatatctgattatgggctttcagacccatgtctgcgcatcatttcggccagacagcgtatgacgggaagaagctccagggcttccttttcgctcagactgtggagctcccagaacagctgctgcttgctgtcgcccatggaatcggtttccgggtaaaagatgcggtcggcgggaattcttaaagtggttaccagaggataaagcacctcgaatttggggtttccccggaaattttctatattaataatggtacggacatctatgcccagcttctctgccagggaagcctgggacattccctgttcttcgcgggcttttcggatgaccgtacctaaagttttaacgtaatcatgcattgtgattcacctcaatactagtgtacactacacttcttatattatgaatcactatgcaatacatataaaatatgaattgaaatacaccaatctcctggatggtataccgggagggggaaaggaagttttgcatgggtgaagggacagaagacagaacgcaggcgtatatgaaacacgtggtgctggaaccggagcatgaaaaagagtatgcacagccgcttctgacattatttgacgaactgctggcctgggacctggcatcaggggacagccgcattatattttatacagagggcaggggccggctgtgggaaaaccggacagagcaggaatttcaggcatttgcctggagccatgtacatccccgggagtgcagccggttccgggcatttttcagcgccgtgcacatgaaagaactttctgcggacagaaatcctgacaggctggtttaccggcaaaggacggaagagggagattatgtgtgggtggaggtggtggccataacagccggcggcggtaccatgctgtgttatgtccgggacatgggaaaggaagagcagaagcggtatatgcaggagcagattattgaccagtacgtgtatagaaaatgcgatttcttcctgtgcctggatggggacacgggttactatgaaatcctgcagaaaaataacagccgtattcagggacagatgccacattcaggaaattatgaacaggagctggaggcatgtatcaggaagtatgtggtgtcggaggacagggacctgcttctggagaaggcatctatgaacaatgtcctggatgtgttggagcgtgaaggcgagctgatggtatcctatggtgagaaggggatggacggccggtatgcccgtaaattgctgcgctatgtatactttgacagacaggagagaaagattctccttatgcgccaggatatcacggcagagtacctggagcagcgcaggcagaagaagcgcctcagcgacgcgctccttcatgcaaggattgattcccttacaggtctgtataaccgccaggcagtaaatgccaagatcaatggaatccttagggaggcagcggtgatgccgccctctgtgctgctttttattgatttggataatttcaagacagtgaacgatacccttggccaccggtatggggataaggtgctgtgttctgtggcagagtgcttccgccaggtcctccgcacttccgacataatcggaagggtgggaggcgacgagttcgtggcctttctctcaggagtcgcttcccttgatgaggtaagggagtgcgccggacgcctgtgccaggcggtgagccgcataccggatttagacctgaagggctgcgggctgtcctgcagcatcggaggggctgtgtgcccaagggacggaggggattacgattcccttctcataaaggcggatatagctgtctatgaagccaagcgccggggtaagaatcagttcgccttttacgagcccggaatgaagccgcattccgagccctgacctgtgcgggcgtgactagcctgtcacttcaatgtgataggttttcagccagaagttgacctggaggagataggccagcatctgaggaccggccatgagctgtccgtaccatggttttccgtagtcagagggactggtgaggaagcgggccagttttttccggtccaggaagtccattaccggggcgtggctgtcgtccatcatttcccttacacggtccacaagcagtttttcataggcggtatcataggttttaggatagggggactttttccgaaacagtatttcatccgggagaagtccttttcctgactggcggagcaggttctttaccagtccgtcccttgttttcatgtcccagggtacgttccagacatattccatgattcggtggtccgcaaagggaacccttgcctccagaccggagtacatgctggtgcggtccatgcggttgagaagagtctgcatgaaccagcgcaggtttaaccaggcgatttcccggcgccttgcttcctccggggaatcctctgccaggacaggggtctctgctacggagcgctcataggtgtccagcacataccggtccatgtccagatactctaagaagttgtcgtccaacagggcttttctgggggccaggtccatggtccacgggaaggtatgggcttcaaagcattcctttttatggaaccatgggtagccgccgaatatttcgtcggcacattccccggtcagggccaccttgttgtgttccttgaccatggagcagaactggagcatggaggagtcgatatcccccatggcgggcagatcatgggccaggacagaatcaaacagacggtcagcctgggtcaggttgccgcattccaggtaatgatggtcggaatccaggaattttaccatctggtccacataggggcggtcctgggagggctggaaggagttggcccggaagaatttatcgttgtccacaaagtcgaaggagaaggtggtcaggcgctttccctgttttttcagttcctttgcgcagatggcagacaccaggctggaatccacgccccctgagaggaaggtacagatgggcacgtctgaaaccatttgcctgcgcacggaatcctccaccagaaatgacgttttctcaatggttcgttcatagctgtcctcatggggacggctgaccagcttccaataactctgctggcggattccatcgggggtgcatatgaggtaatggcccggaagcagttcctccatgtcctttaggacgccgcagccataggtcctggcaggcccgatggagaacacttcattcagtcccctgcggtctaactgcgccttgacgccgggataggccaggattcctttgagctctgaagaaaaaatgagttcctcgcctcttaccgtatagaacagaggttttactccggcccggtcccggaacaggcacagacggtttaatgccgtgtccatgatggcaaaggcaaagataccgttcaggcgttttacaaagtcagggccgtattccatatagcctgccagtatgacctccgtgtcgctggaggtctggaaggaatatcccgcggccataagctcctggcgcagttcatcggtattgtacagttccccgttgtagacaatggcaaaggtctgtccggagcctgatttcaccataggctggtggcctccggccagatctatgatggacaggcgggcatgggacaggccgccgtgttccgagagccaccgtccggcgtcatcggggccacggtggcgtaagcgttctgccatggcctgcaggacagattcatagtgttctttctctttcaggtaatggtcatgagggttataaaaaccggcaattccgcacataatttattcctcctgtcatgatgtggaaatgtgtttggtgttaaagcatgaagcatgccagggcaaaggtacaggcaaagccgatacagaccggtatcaggttttttctggccagttccagcgggcttacattgcagatggcggcaaccgggatgagtccccacggcacgatggtgccgccgcccacgaagatagccgtaatctggcccagggccgccatcaccggtacagacgagccggtggcggttccaaaggtcctggccagggcgccggtcaggggaaggcctgaaaaaccggaaccgtccagacctgtcagtccgccgaccaccatctgtataaaggccgccatatatttattaaggggggcattctgcgccagccacagggcccagtcattcatgatgccacggttaaaacgttcccccatgatggaggtgattccatcccctcctaaaaagaaaaaggcaccgattataataaccggagcaaagatgcggatggcaaagagaaaaccttcagtgacatagcccgtgaccttttccagggactgtttcccaaagcccagcaaagcgcccaggcaggtgataaggagggcggtgccggagaccatgctggtggcatccccgcccttcaggccgcacagcagcatgaggataatatcccctgcaaaggcaatcggggtaaagacagccaggaacagggcggccttcttatgtccctggggcctggagggttctgcctgtatggagagcctggggcccctggcatccagctggctcctgtttaacacatatgcgctgaggacggtgacaatgcccatcatccagaataaaggccatgcctgacggagaatagaggatgtgtcaaggcctgctgcgcctgctgagatagcgggagcgccctgaatcaccacatcgtagctcagcgcaaagccgtgtccgaacaggttcatggccatggctgcggctaagggatttaggcctgcctttacagcaaagggcagcatgatggctcccaccagtgcaaccgagggactgggccacaggaacagggaaaacaggaacatggtaagccccaggatccaccaggtcagggaaggtgttttcataatgccggccatgggaaccatcatcagatagtcgcttcccaggtccttcaggcatttggaaagggaggtgaccagggcaatggttgccagcacctccatgaattccttgcctgcgtagagaacagcggaaaatacggttatgatgccgccggtaacagatttaaggccgatgaggcccaggataaacaggaaggcgatgcagacggcaggcgtatcctttttgaggaccatcactgccaggataacaatgacgcctatgagataagcgtagtggagcggagtcagcactactgcggattctatcataataagtcactcctgtatttatggaatataatctatgatatggggaaatgctctcctccgtgaaaaggaaatcaggaaattaggggttgattttatggccgggtactggtatgctagataaggattaaattttaaaatgaaaggaagtgaaccggagtggaaggtcgaagtcataagttggaagcagacaattatcataagcgtttggtagtgggagctgcgtcggcggctttgatcccgctttgctttcactgccgttaattataggattcatatgcgtttatgatgatagccattattacaggaggagtctgtaattatggctgttttgttgttgcggtccggccatccagggcaggactgcggcattttgcgtgctgctttcatgatgtcaccattcatggaaggaataagatgcaggagaattttgatttaaaagagctgatggagctgttagacacaatgcagctcaggttactgaaggaaaagctgattgagatgaacgaggtggatattgctgcgttcatcgaggagctggattccgagaagaccgtagtggtctaccgtatgcttcccaaggagctggcaagcgatgtgttcgcctgcctgcctgtggagaagcaggagcatattatcaacagcatcacggattatgagctcagcgctattgtaaacgacctgtttgtggacgatgccgtggatatgctggaagaactgccggccaatgtggtcaagcgtgtgcttaagaactccacgccggacaccaggaagctgatcaaccagtttttaaagtatccggagggcagcgccggaagcataatgacggcagagtatgtgggtctgaagaagcgtatgaccgtggaggaggcatttgcctatatccgcaggcacggcgtggataaggagactatttacacctgttatgtcatggacgcaaagagggccctggagggtgtagtgacggtcaaggatctgctgatgcatccctatgaggaagtcatcggcaacatcatggattcacatgtgatcaaggccgtgaccacagacgaccaggaggaggtggcggagagcttccgtaagtacgacctcctgagccttcctgtggtggaccatgagaaccgtctggtgggcatcgttaccgtggacgacgtggtggatgttatggagcaggaggccacagaggactttgagaagatggcagccatgcttcccagcgagaagccttatcttaagacaggcgtgtttgccctggcaaagaaccgtctggcctggcttctgattctcatgatcagcagcatgattacaggcagcatcctggcaaagtacgaggcggcctttgcggtgataccgctgctggtgaccttcattcccatgctgacagacactggaggcaacgcgggcagccagagcagcaccatgattatccgcggcatggcggtgggagagattgaagccggggatatcctgcgggttctctggaaggaactgcgggtgggagtcatagtgggcgtcctgctgggactggtcaattatatacagctggtaatccgttttccgggacaggaaatgctctgccttacagtggtactgagccttttagccaccgtcatgctggccaaaaccattggctgtgtcctgcctattgtggcccaggttctccatctggacccggccatcatggctgccccgcttatcaccaccattgtggatgcggtgagcctgattatatattttcagctggcttgcagcctgctgaagatttaggaagaatgttcagagccggaatcttgtttctatacgggattccggccttttgcttttggatggtccccggccattctggtttccggccatttgttccccggccatttggttcccgtccgattttggtcccacaatttgtaaatcctcagaaccctctattgacaatggggaacagattttactataataaaggtaagttataaaacatgtttcaagtctttgatatctgcccccgcgtccagtttcagcagaacttatagtatggaggtgtcgtgattctttgaggtgcctccggtcttataccatatattccatcaagaaagagaggtagttatatgaaccaggaacagctaagaatcatgagcgggaaaaatgggtttatcgcggcgttagaccagagcggcggcagtacgccaaaggcgctcaagaattacggaatcggagaggaccagtacagcaatgacgaggagatgttcaatctggtccatgagatgcgtaccaggattataaccagtccctcctttacctcagaccatatcctggcagccattctttttgagaataccatggagcggaagataggggataagctgactgcggattacctgtgggaggagaagggtatcatccctattctgaaggtggataagggtctggcggaggaagcggacggagtccgtctgatgaagcctattccggggctggatgaactccttgtacgtgcggtggagcgccatattttcggcaccaagatgcgttccgtgattaagcaggctaaccctgtgggcatcaaaaagattgtggaccagcagtttgaaatcgggcttcgcattgccgctgcgggactggttcccatcttggagccggagattgatatttacagtccggataaggctgaatctgagcaaatcatgaaggatgaaatcaggaaacatctggcagagcttgcggaggataccagactgatgtttaaactgtccattcctgataagcacggattctacagcgacctcatggaagattcccatgtagtgcgtgtggtggcgctgtccggcggatattcccgccaggaggccaatgagcgcttaagccgcagtccgggactgattgccagcttttccagggcattgtccgaaggccttaatgcaaatcagacccagggggagtttgaccgcatgctggcccagtccattaaggagatttacgatgcatccataacctgagacagggaggctccgccattgccgcggagcctttttgcgggccggaaacagagggatggatatggggattattgggcgtatttggaggactgtcttctgtttacaaggactgttataaatggtatcatataaaaagatgtgatgaaaatgtatcccggtaaaaggatacagaggcgttgagttatgacaagaggaatctatgaaacgtaagttaattggaaaatggcatgccgccgcttttttggtgttctgctttgtgttcgcactgacagccagcggcgttttttacaatcagcgcgggaagctggctggggaatacggaaacatggtggcatccaatctgacttcttatacccaggcccaaaaacgttacctgaacagctccatcacggatgcctggaataccctgaaagggatttccggcctggttgaacagattgtcccggaatatacccaggattccctgaacggatatctggaccagcttaatttgcagaacagggactatatgatagaatatgtgaccctgcaggagctggagagaaggctgagggtccagcaggcgtcggaacgtgactggagcctgtttggtgagcttgagcagggaacaggtgtggtgtccgatatatgggactggaagaaggccgggaacaagtcggtgttcacggtcgcggaaccggtctggaagaatgggaatgtgattggagtgctgcagaccagactggagcccctggctatcacggaacaggttcctgaggcaagtgcatttacgcgcagcagcactctcatagtgagacgtgatggaaccatccttgccagtgagaaccacaatcgtggtgatatatccacagggaacctgtttgattcggtaaaggtagccggcattacggacgaagtagtggagcagatggaagaatgcttttatgaggacgattcagacagcttcatgtttgaggggaagggggattcctactatttttcctgggactatctggggtataatgagtggtatattgtaaactttgtgcgatccccggatgtggccattcactatgacaatatattgaaagagcttatctatgccggcctgtttctgattagcctcacggctgttctgggatgtgcaatcgtggttttgttcctgcattaccggagaagtctggattttgaaattaaaaagtacggtctgctggcggagttttccgacacggctctctttgaatacgacaggagaaaggacgtactggaatttaccaacaatgccagacgcatcctgatgctggatgagcttaaaatcagccatatcatgggaaaaaagaccaggacggacctgtttgtccaggaggacaggaaggttatggaggatatgctgagaggctggaccggcagcggggaggacaaaatccagtatgcggaattgcggcttaagagtatttccggcgagtatcactggttcggatgtcattataaggccattgcctctgatggggggacagtggtcaaggtggtgggcaagctggcggacatttcgcagcagagaagcagggagcaggatcttcgggaacaggccatgcgggacgtgcttacgggaatctacaacaaagcaggtgaaaagctgattgaccggatggttaaggaaaaaggacagggactgtttctgatgctggatttaaatgattttaagagcatcaatgataccatgggccatgcggcgggggacgccatactcactgagatgggaagcgtccttaagggaacctgcagggaaaatgacatagtggcccgcattggcggagatgaatttgtcatgttccttccgggggcttttgactggcagacaggaaaacgcaagataggggaaatccaggaaagtctcaggacagtcatgatatccgcctggggcatacggggaatcagggccagcatcggagccgccctgtgcccggaggacgggctggattacgagaccttgtttaaggctgcggacgaggccatgtatctggacaaggagcagtccaaaaaccggaatgaaagcagggaggcaggagaggaaaaacaggacaggacaatatcatgacacagcaggaggaacaggacatgaagcacggatggggtagtgtgattctgtcaggaggacagggacgccgtatgggcggtattgacaaaggaggactggactataagggagagtctttttgcgggcatatacagaagcagcttcaggccctggacatcccgtgctacctgtcccgggcctgttatgcaggcagcggtggcagggaaggcggactggaagtgattgaagatactgtaaagggggcagaaggagagtggattggccccatgggcggtatatggtcctgctttcagcgcacaggacttgaggggctgttctttgtgtcctgtgatatgcctttattcaggaaagagatggcggccattctgatggagcggtgggagccgggggcggacgcggtgctgtggaggaccagggacggccgtatacagcccttatgcggcttttacgcggccacctgtctggaggcgctgggagacacgatccgtcagggaaattaccggctgatgaagttcctggacgctgtacgctgtattgtggtggatacgtcagaggcccatataccggatatctggtttgccaatgtgaattcaccctccgcctacaggagcctggaagggctgcgcacgcctgtcctggctgtaagcggcagaaaggacaccggtaagacagcccttttggagatgctggttggagagctggacagggtgggaatccggtctgcggtaatcaagcatgacggccatgagtttgaggccgatgtgccgggaaccgacagccggaggataaaggaggcaggggcatacggtacagtggtgtactccggcaccaaattttccatgacaaaggagcagccttccatgaaggcagaggatttctttggtttcttcccggaggcagacattattttcctggaaggacagaaagattcggattatccaaaactggaggtactgagaagggaagtctcggatatcccggtgtgcagaccggaaacagtgctggcttatatctggagcggggagattgcctggagcggggagaacacctggagcggggagaatacctggagcggggagaacacctggagcggggaagagtgtccgggcaggggtaaccgccggaatgggaaatgtcccgtactcacagctgctcagaaagaccgcatcctggaagtcgtgattgggcacatggacaggtactgcaggggggacggaggagatgaactatgacagtaaaggaagccttggaacaggcggattttttcagggcggccggtgcaggcagccgggatgaaatcgcgggttttgcctatatacgcaggtttggcaagggagcgcatgtgttttatgacagggaagagagcacgtgcctgtattttctggtggagggagtggcgtccctgtataagattaattccctgggagagaaaaaggtcatatttgtctatgggccgggaaatctgctcaatgaagacagcctgctgagactgacctctgcggtgaactgcgaggtgcgggaggattctcttgtaatggtgctgccggcagaacggtttatccaggtcatggataaggacggcaggctggccagagaagtcatgggggccatggctcttaaaatacgccggctgtaccgtcagcttaagaataccactaatgccctgagcggtgagaagcgcctggcggcaaagctttttaaactgggaaaagattatggggtatgttcaggggacggaatcttgattgacatgaacttaagtatcacctatctggcggatatgctggggtcaaaacgtgagactgtttccaggcaggtcaaaaggctgacagagctggggctcattaatatggaaaagaatcggattaccattccggatatgaaaaaaataagtgaatattttaaacagccgtgatgtaggtcacggcattttttgtgcaattctgctatactctctttgatggttaaattattaacataaggagagcgcctacatgggatatcaattgaaacaaggagacatggaacaggtatttgaccgtttaaccagcggatacgacatctatggtccggtctgcatgaaaggtgaagggatgtattcagatacggatgtggtgcgttatgggcggatacatacctttgaggagctggaatgggaggtgaagtcccactattcctttaaggaagccgttcttcccattacccagatactgttttactttacggagcatgagatgaaggaggcggagcctgagagacagaagccggccatcctctttatgcgcagctgtgacatccatgccataaagcgtctggaccaggtatacttaaatcacggggccgaggattactattacagacgtcttcgggagcgggtgaggcttgtgctgatgggatgcgcccatacctgcgaaagtggattctgcgtatccatgggaacaaaccagaccagggattacgacggagctgtcaatatggttgaagccggggatatacaggccggggatatacagggcggggagggcatccgctggaagctggacagccggtggcaggcgcttacagaaatcctggaatccatgaagcttcctgcacaggatgtacagcccgactatgtgagggagaaccaggttaaggtacgggtgccggagaactgcggaccggaactcacaggacatcctgtgtggaaggaatatgacagccgctgcatagcctgcgggcgctgtaattttgtctgtcccacctgtacctgctttaccatgcaggatatcttttatcaggacaatgaaaacgcaggggaacgccggagggtccatgcgtcctgtatggtggacggctattcggatgtggcaggaggcggttcctgccggaagaataacggggagcggatgcgttttaaggtgcttcacaaaatatcagatttcaagaagaaattcggctaccagatgtgcgtgggctgcggacgctgtgacgacatctgtccggaatatatatcattttcagcctgcgtgaacaagctggctgacatggaaaaggagggccggtaggatgcaggcacaggaatacaccccgttttcgtcacagatcttgaaggtgaaaaagcatacggatattgaatatacattttccatgtcctatacgggccgggtaaagccgggccagttttttgaggtgtccatacccaggtacggggaagcgcccatatcggtaagcggtatacgggaaggccaggtggacctgaccatccgccgtgtggggaaggtgacagacgaagtgtttgaacgttaccagggcggacagctgttcatgcgtgggccgtacggcaatggtttcgatgtggaggactataagggcagtgagcttgtaatcattgcagggggaaccggcgtatctccggtgaggggagttattgactatttctcagtccacagggatgagcgcagggccatgtggctggtggccggttttaagagcccggaggacattttgttcagggaggatttcaaccggtggagggataccatgaacctgattctcacagtggacggggcagatggggagtatgacgggccggtaggccttgtgaccaggtatatacccggcctggaacttgaaaatccttccctggcaaaggccattgtggtgggaccgccggccatgatgcgtttttccgtgaaggcgctgctggagcggggatttaaggaggagcatatctgggtatcctatgagcggaagatgtgctgcggcatcggaaagtgcggccattgccgtatcggtgatcaatacgtctgtgtggacggcccggtattcctgtataccgaggcaaagaacctgatggattaggaggcggcaggaatggatgtgaatactaaaaaaataaagaaaaatgcgtttcgcgtcacaaaggaacgggggcttacagcctccagggtgagagtgccgggaggccatctggatgccgggtacctgtccatgatacaggacatagcacagcggtacggaaatggttccgtacatatgacggtgcgccagggatttgagattcctggtatccggtatgaggatatggacaaggtaaatgagctgctgcagcccatcatagagggcataggcatcaaccagccggagaggggggagggttattccgcctccggcaccaggaatatttcggcctgtgtgggcaataaggtctgtccctacgcctgctacgatacaagcggatttgcgtttaagatagaaaaagccgtgtttcccgacgaccttcatgtgaaggtggctctgacaggatgtcccaatgactgcgccaaggtaaggatgcatgatttcggaatcatgggcatgacgcagcctgagtacaggagggagcggtgcgtcagctgcggcgcctgtgtgaaggcatgtaagaagaaatccgtgggagccctgtcggctgtgaactacaaagtgcagaggaaccatgaaacatgcattggctgcggcgagtgcgttatccagtgtcccaccagggcatgggtccgcagtgagaagaaatactacaggctgacccttttgggccgcagcggcaggaagaatccgcgtctgggagaggattttatcaagtgggcggacgaggagagcatattaaaaatcatcaccaatacctatgactatgtgcgggaatacatagataaggatgcgccggggggtaaggaacatatcggatacatcgtggacagaaccggttttgaggagtttaagagatgggccctgaaggatgtgaagctgcccgatatggcagaggtaaatgaacgtatttactggagcggcgtgaagtattgatgaaaaggactggagggatgaacgggatgaagaaaatacaatccacctgtaactactgcgccattgactgcaacatggatttctatgtggaggatgggaagatcgtgaaggtactgcctgccaggggatatccggtgaatgacgggttctgctgcatcaagggactgtcactggataagcagcagaccgttataaagacgtcccctctgccgaaaatccggcaggcggacggaaccatgaaagaggtgtcctgggaggagggcttttcccatgtggcggataagctgaaggagctgcaggccaaatatgggcaggagagtgtggcgggaatcagcacaggacagctgaccatggaggaatttgccattttcggccatgtcatgaggaattacctgaagaccaatgtggacggaaataccaggctgtgtatggccacggccgtggtggcccacaaacagagctttggctttgacgcgccgggctataccttaaaggatctggaactgtccgacaccattatttttgtgggggcaaacccggtggtggcgcatcccattctgtggagaagggtccgcatgaataaagaccccaataaaaaaatcgtggtcatcgatccaagacgttcagagactgccatgaatgcggattactggtatcctgtaaaatggaaatgcgacctgttcctgttctataccctggctaaggtgcttctggacaaggggtatgcggacaaggaatatataaaggcccacacagaaggatttgaggagttcagggaatttgtcaaggattttaccctggaccaggcaaaagagtgctgcggccttaagccggaacagattgaagagctggcggagctgatacacagcggtaagcgggtttccttctggtggaccatgggcgtaaaccaggggtatgaagccgtgcgcaccgcccagtccattatcaacattgcactcatgaccggcaacataggcaggccgggaaccggggccaattccatcacaggccagtgcaatgccatgggctccagggcctacagcaacacggccgtattctttggaggcggcgacttcaccaatccggccagaagagccaggatatcccaggtgctgggagtggatgaaagcatgctggccgccaagccaaccgctgcctacaaccaaatcatagagggaatcaatgagggcagaatcaaggggctgtggattctgtgcaccaatccgcgccacagctggaccaacaatgagacctttgccagcgccgtgaagaagctggagctttttgtggtacaggatatctatgacagcattgagagcgcggaggaatgtacggtgttcttcccggtggtgcctggtattaaaaaggaaggaacctacattaatctggaacgccgtctctcggccatgcgtccctgtctgcccagaggggaacatgagatatcagactacgaggccattctgggagtgggacgtgccctgggaatgggagacatgctgaaaggctgggagacgccaagggattgtttcgggcttatgaaagaatgttccaggggaatgccatgcgacatcaccggcgttacatgggaaggcctggagaattcccacggcatccagtggcccttgcgggaaggcgagtcaccaaaggaggatgagcgccggttatatgaggacgggaagttctatactcccagcgggaaagcccggtttcaattccagtctcccgttaaaaaccctcttccccttacagaggaattcccctatgtgttcaatacaggcaggggaagcgtggggcagtggcatacccagtccaggacaaaggaggtccagtttgtggaggatgtgtctgccgcagaagcgtatctgtttatgaatccccgcacggcagagtgctgccgcatacaggaaaatgactgggtacgcgtgtattctgttaacggacagaatgccttattcagggtcagggtatcagaccgggtgggggagcaggagctgtacgctcccatccattacatcgaatgcaacagactgacgccgtctgtgtatgacccgtattcaaaggagccttcctacaaggcgactccggtgcggtttgagaaagagcataaaaagatggcaggaaaaacggatgatgagatgggagaggaggccggcgtatgtatcggataaaaatagacagggaccgctgcatcggttgtctgacctgcgtaacagcctgtgtggtaagtcatgagagcagtgacgccaggaaccgggtggtcattgacagccaatccaaatgcgcgcccatattctgccgcaattgtgacaggccggaatgcgtctacacatgtatgacaggagccatgcacaagaacccggacactggctttgtggaatatgacagggataaatgcgccagctgctatatgtgcgtcatggcctgtccctacggtgtgttaaagagcgaccgtgtggaacacaaggaaatcatgaaatgcaacatgtgcgtgcaccgcacacaggacgggtccccaaaacccatgtgcgtggagctctgccccatggaggccataactcttgaggaggtaaaggtatgagatatgtagtgttgggagcttccgcagccggaattaacggagtgcgggaactgagacgccttgacccggaatcagaaatcatactggtttccagggacagggaaatctattccagatgtatcctgcaccactacctgggcggaatcagggacaaggaaggaatctgctttgcagagcctgattttgaggaaaggtacagggtgaaatggtataaagggatgagctgcaccggactggacgcagaggcgcgggagataatcatttccggcggtatccggattgggtatgacaggcttcttattgccaccggttcccgtaccagccttccgccggtggagggacttgggcaagcaggaggagtatacggcttccataacctggacgaggtggagcagattaaggacagagccttgccccaggaacacattgtggtcatgggaggcgggcttacgggcgtggacgcggccatgggattcctccacatgggaaaaaaagtggagctggtggagctggcggagcgtctgctggtaaagcagctggataagagaagcgcatccacctatgaaacggcgctgaaggaccggggcatccggcttcacctgggaaccggaattaccagggtgtgctgcggaccggacggaaatattgcttccatacagctttcagatggacaggagcttccctgcaccatgctggtcgtgacggcaggagtgcgtccgaacataggattcctggaaggaaccggcgtggagttagaccgcttcggactggttatagacagccatgggcgcacgaatattcccgaaattttcggtgcgggcgatgtgaccggccgctcgcccatatggccggctgccgtgaagcaggcagtggcggcggcggccaacatggcaggccattccatggccatggacgatttctttgccagtaaatccaccatgaattttctgggaatcccaactatgtccctgggaatgccggtgaagccggatgatacctactgcgagacggtggaggatacaggggaacagtaccgcaaaatcatccacaaggaagggcgtatatacggcgccattcttcagggggatttgtcctacagcggcgttctgacccagctcatagccaggcggattgatgtgtccagggtaaagaaaccgctgttcagaattgattattctgacttcttccatgagaaggataattttgaattctattacgatgaggtgacgagatgagagagagactaaaaaacatgcctgttcccgtggttgccaccatgctgggcgcagcgaccctgagcaatgtgtatcagtccctgggatttgactgggtaaggcacctttccatgtgggcctccaccctggtacttttgttttacatagctaaaataatcatccatccatcagccgtgaaggcagagtattccaacacggttcctgccagcctttacgcgggaatcaccatggtgaccatgattctgtgcagctattacaaggtgtggtttcccactgcctgcaaatggattttcataacagctgtgtgtgttcacgcagtacatatcctggttttcctgtgccgcaacgtctttaagggggtgaacctggatacctttgttcccagctggtttgtcacctttaacgggattatggtgtccctggtggccggacccgacatgctgccatctgccatggctaaggcggttttgtactggggcctgtttatttacacggtgaccattcccttcatggtatggcgtctgattacccgtgaagtaaagccgggcatgctgcacacccaggccattgtgctggctccctgcagcctgtgcctggtaagctatctgaatatagtaaaggagcctgtccgggccgtggtgatgattctctatgtctgtgtgattctgtctctgctgttcatcctggtgaagctgccaagatttttctccgtgccgtttgctccgggatttgcgggtctcaccttccctatggccatcggtgtggtggcctccaccaaagccggctcctatctggcgggaattggaaacgaggtacttgcctatggggtgaagcaggtggccggaatacagatttatgtgacaacagccattatcggcatggtgttgtttggatttatgaagatgctggccggaaagaaggcctgacaggaagaaaggcaggccttatcttataataaggcctgcacgtcagcttctgaaaaacgtttttttagtccggatatattctttccatttacagcagtcattcaggtggagcattacatggcgggcaggcggcataagcagtatacccgccacatcctttttaccccagaagtcaaggagccatatggagttttcctgctgtgtaaccccgccaacggacaggattttgtctatatcatcctgccgtacccggcgttttaagtcagcggcacttaaactacggattatgtcccttgtcttatgcgccaccgcatttctgtaacaaatcagctgctctgtattgatggttctgcttaattccataatttcatcatcagtaagtgcatttcctgtatctgtaatctggctgttcagccgttccctccagtcctggttaaacacctgttcttcccgggcaaccaggatattcatggtcaaatcttcgattctggcgatatgccataaaacccacgcaatggtttcgtctttgcgggtgggcatgacggcatattcgttctgcttcaaatcacataaaagattatccacctcgtttctgtctgtatcagataccacagaagggtgcagctttgcatgtatctgcaggaacaggtctttggagcgttgggtctccgaaggctttcggatgatgctgtttaattctttgtgctgttcacttaatccatgaccaaaatatttcatttttatactcctgtagttgaagttttccctcacttttataaagcagagcagggctgtcatttcatctgccaattttatgtttgaggtttatgtaaaacattacaatctgaaacacctctgtagtcatatgcgccggagctgggaatacattttctgatttgtcattcttgcgggaaatcacacgcccttttctgattttagaataacataaaattagtccaaagtcactggctgtttgataaggggcgcagtacctgacagtgacagcgccatttgctaacaaaatttttgaatagcctgtaggaaagagaatgaaaaatgtgtgaagcaaagcatataaaactcggtcaaatgcagtcataaaatgaatttgattttgaaacaaatatataaaaatgaagtaaaattcaaaagcaatacttcaaaataaaagttcaattttgaaattttattaaaaatgtcgaattaaaaacttgaaatacggttatttcaagagtaaaataggttaaaatgtataaaaaaaccataatatatttacttcggttgtcacaaatactatactttaactaaagataaacttcagttgtgataaccgggaatggagtgagggcatgaatgaactattagtcaaaattaggtttctgattccatcccttcccagggcggagaaagcatttgcacaggctcttctggagaatccggaggcaatcacccatctcactttggccgatatagcaagggaatcaaacagcagtgacgcatccatcatccggttctgcaaacggctgggatatcacggttactctgatttgaagcaggcatttacggctgcaatcgccgagggggatgaagtccatgaggaggagattgaagaatccgacgatgtaaacgatatcttaaaaaaggtattccagagcaacgtgcagacgcttcagaataccatggtgttggccaatgaacgttataaggatgcgctggacgccctgattgatgctaaagcaatccattttttcggggttggggatgcgtttgcagcatgtcagttcgcatttatgaagttctgccgcctgggaatcccctgttcatcctacagcgatgtgatgcttcagtataccatagcagataatctgggacccggggatgtggcgctggccgtctcttatgagggaaggtccaggaatgtagtccaggccatgaagatagcaaaaaagcggggagccacaaccatcagcattacgaagatgaacaaatcgccgcttctcagatacacggacatcccgttatttatatccatcagcgaccttacggtgggtagagacaaggtgacacggcgcgttgcagaccagttcatactggacgtactgtacctgggatacataacaaagaaaaagcaggatttttccaagcgtcttaaaaggacccagggcgcaattgactgtaataaaatcatgtaggaggataagagatgtactgtttggcgccatcggtttatgcggcggatattatgcaactggaacagcagctgcgtgtgatggaaagggccggcgtatcctgtcttcatgtggatatcatggatggaagttttgtccctaatctttcctttgggccggactttgtaaaggagcttaagggttacacggatatgaagctggatgtccacctgatggtggatgagccggtacgttttataaaggcatttgcggaggtgggagccgacgtgataacagtacattttgaggcgtgccgggacatggaacatacgctggacgccatccacgcagtgggaaaggaagcgggaatcgtgctgaaaccggaaaccggattaggcaggataccgctggctgtctggaataaactggacgtccttcaggtcatgactgtggctccggggttgaagggacagcatttcaatccgctgatgctgggaaagattgcagaggcaagacagttttccgaggggattggaagggatattgatatagaggtggatggggacatcaccccggacagcctgaggctggtcatggcagcgggggccaatattattgttgtgggaaaagggctgtttgttggaagcctggaagataatctaagaaaatatcttactatcatgaataacaaaggggaggaacgtcatgcgctatttaataggaattgatatcgggacaagcgccaccaagaccattctgatggatgaagagggaaacgtggctgcccaggctgtcagggattatcccttatatcagccggacaacggctgggcggagcaggcgcctgaggattggcagcaggccgcgctggaaactctgaagcaggtggtggagcagtccggcgtgaatggtgatgacattaagggaatcggcctgtccggccagatgcacggccttgtgatgttagacgaggcgggcaatcccatccggcgttccattatctggtgtgaccagcgttccggacagcaggtggatgagatgcttaagctccttccatatgaaaaatggctggagattacagccaatccccccattgcggcctggacagcggcaaagcttctgtgggtaaagaggcatgaaccggaagtttatgcaaagtgcagacatatcctgctgcctaaggattatatccgctatgtacttacaggacagtttgccacggatgtatcggacgcgtccggaatgcagatgctggatgttaagaacagatgctggtcagatgaagtcttggaagtgcttggtgtgcagaaggatatgcttggaaaggtatatgagtcccaggaggttactggccggctgctgcagtcagtggctgagaaatgcggtctcaccgcagatgtaaaggtagtggccggttctgcggacaatgcaggcgcggctatcggtaccggagttgtgagggatggggatgcatttacatccatcggtacttcagccctggtatatactcacatggaccactacaccccgattcccgaaggaagtctccatctgtgctgcagttgcgtgccgggatgctggttcaccatgggaggaccccaggcagccggactttctctggaatggtttaaggataactattgccaggactataaggagaaggccaaaaaggatggcaggagtacatacgatttaatcaatgaagcggcagcagatatagggccgggaagtgagcgccttatattcatgccatacctgatgggggagaggacgccccatatgaaccccagatgccgaggggcatttgtgggactgaatatcattcataccaaagcgcatttactcagggccatcatggaaggtgttgcatattccctggcagactgcaacaatatccttaaaaatctcggaattgctgtggataatatgaaggtctgcggaggcggaagcaagagcccggtttggcggcgcatcatggcagctctgtatggctgcaatatcatccagctggaacaggaagaaggacctgcttacggagttgcaatcctggccggagtgggtaccggggtgtatgatgacgtaagggatgtcagcaaaaagctggccaggtgcggacgggttacggttccggatgaggaggaggccgcagtataccggaggtaccatgcactgtatgaccggttgtatgaccacatgaaacaggattttaatgatttgtatgaactgtaaaggtacggtaccgcgccgggtaaataacattggatacagtacaggcagcaggtagtacgccgcacgtgcggctggaactataaagtaagaaaaataataaaacacatggaggaatcattatgatgaaaaaacgttttgcaacagcagttacaattgctttagcagccgcttctatatttggctgctcaaacagcgcaagccagagcaagcagactacccaggcagctgccgcggccgcagaagaaaacaccacagaagcagcaggaagtaccacagaagcagcagccggcgaaaaagcttcgtccggtgcagatgcttcttccgacaagggaggaaagacctttggcgttacatactggattgaatctgatttctttaaaactgtggcagattccatcacttcagcagcagaagccgacggcaataagaccgttgtggtggacgcacagcaggacagcaccaagcagatccagattattgaggattttattgcccaggatgtggacgcagttttcctgaacccggttgacagggatgccgttgcaccggctctccagaagttaaaagaggctggaatcccggttatcaactttgactcatccgtagcaaatttagacctggttgacgcttatgtggcaacggataaccttcaggctggcaagctctgtgcagagtcaatgattaaggattttccggaaggaggacccattgcggttcttaactatccggccaacagcgcctgcctggacagagagaaagggttcttagaaaccatcgaaggcaaaggctttgaggtggtagcaacctttgacgcggaaggtactgttgaaaagggacagaacatcacaagcgacattttacaggcgcatccggacatcgtggctatcttctctatcaatgatcaggcaggaatgggcgcatatgcagcgtgtacgacttcaggtgccaatgtatccatttatggtgtggacggcgctccggaggccaagcaggtaattgccaaggaaggcagcatttacaggatgacagctgcacagtccccaatcaagattggcaccaactgctatgatgtggccatgactatcctttccggtgagaagccagcgcagttccagattgatgttcccgcatttaccatcgacagcaccaacattcaggagtacctgggcgcaggatggcagtaggatataacatcagggcgtgcagacagcggaatgaatgttagaacaaatgaagagagaataaaacagtaataccggcagggggcggcgcataatgccgcccccttccaggggcggaccgcgccaccgggtccgcacagatccttaacggggtgaagtttaacatgcatcgcacgtaagcgaccgaaagacggacgcaaagtgctcatagcaaaggagacgggatatggaacagttgctgaggatggaagatatctgtaaatctttttctgaagtaagggtattaaacaagataaagctggaactgcgccagggggaagtccatgccctgctgggtgagaacggtgctggcaaatccaccttaatcaagatactgggcggcgcatataccagggatggcggtgagatatatgtaaacgggcagaaggcggatattacaaatgtggagagcgccaagaaatacggaatcaggataatacaccaggaacttatgttgatctcctatatgaccatagccgagaacattttcctgggacaggaacccagaaccaggctgggaaccgtggatacggataaaatgaattctgagacagcaaaattcctggctgaaatggagttgtcgcttaagcccacagatctggtgggaaaactgaatattgcacagcagcaaatgatagagattataagggctatttcctttggagccaagattattgtcatggatgagcctacctcatccctaacggacaccgaggtggaagtattatttaaggcaatccgtaaactgaaggaaaatggcgttggcatcatttatatcagccacagaatgtcggaattggatattattgcggaccggataacggttatgcgtgacggcgaatatgtggacaccgtggtgacgaaggagacagaccatgacaaactggtcagcctgatggtggggcgttctctgggagacctttatgagaaacataaccacgccacggatgaagttgtactaaagatagagcatcttttgtccggcagggaagtgagggatgtaacctttgacttacataagggagaagtgctgggcttctccgggttagttggatccgggcgttcggaagcaatgacatgcatcttcggcctcaggaagaaagaaaagggaaaaatttatatttccgggaaagaggctaagattaacagcgtcagggatgccatgggatatggaatcgggcttgtgcccgaggacaggaagaaggaagggatttacgcaatccagggaatccgtttcaataccaccatcgaggtgctgagagagtttttaaagaacggacgatatgactgggataaggagctggcactgaccagggagtatgtggatgatgtcatgcaaaccaaatacgccggggtggagcagcctatcggaaggctcagcggaggaaaccagcagaaggtaatcatcagcagatggcttttggcaaccaaaaacatactgattctggatgaacccaccagaggtattgatgtaaagacaaaatcagatatttaccacttgattgacaggcttacggcacagggcttatccatcattttcatatcatctgaaatgccggaactgattaacatgtgtgaccggatcgtagtcatgaaccaggggcatacaaccggtgtcctggagcgggaagagttttcacaggaacggattatgtcattagcaacgatggaattataaggagagagcagccatgaagaacaaatttggacaaacaatgaaaaatacggtcaaaatgaattttggtatccttatgggactggtcatcctgtgcttaggcctgactgtcctgacggataagtttgcaacagttacaaacttttttaacgtggtgcgtcaaattaccatcaacctctacctggcatgcggcatgacctttgtcatccttttgggcggcattgacctgtctgtaggctctgtcatcgctgttaccggatgtgtcagcgcgggcatgattacatgggtaggacttcctgttccggtgggaatcctcatcggtattctgtgcggtaccctggtaggtgcgctgaacggaatcattgtttcaagaacaaccataccggctttcattgtcacattagccaccatgaatatcggcaggggtattgccagaatttatacccatgctcagaccattgcagtactggatgacccttataccttctggggaatgggcagtattctggggcttcccatccagctgtacctgattatagcggtggtggtgctcacatcctttatactgaaccggaccggtctgggcagacatatctatgccacaggcggcaacaaaattgcatctgaatattcaggtatcaatgtaaaaagggttacattcttcgtgtttgtactcagcggatttttggcttccctggcaggtgtgctgaccgtgggaaggacatttaccgctaccatgattatgggtgacggagctgagatggacgccatcgctgcggttgtactgggcggaaccagcatgagcggcggcaaaggcagcatttccggtacggtcatcggtgttattgtaatcggtatcctgaaaaacggtatgaaccttctgggaatcgactcctcctggcagtatgtggtacagggaatagtaatcctcatagccgtatacatcgactatatcaagtcggaagggtctgcgttatctgcatttaaggcaatggtcggaaagcgggcgtaaaacgtatggacagtggaaaaataatcgagacagtattaatggagataaaccgcagtgtgtcaggtatcagccacaaaagcctggaagcgctggtggatgcggtgaaccgggagaaacgaatattctgtgacggtgtgggaagaagcaggctgaaggcggaaggattcgctatgcggctaatacagatggggtttacggctctggtggtcggggaagccaccactccggccattaccagggatgacatgcttctcatatgcagcgcgtcaggggagactcccatgctggtggaacacgcggccaaggcaaaaaaagtgggggcggcagttatgctgattactaccagtgaaacatcctcacttgcagtgcttagtgactttgtgataacgattgatgcttcctccaaaaccacacggagcgacgcgtccgtgcagcctatgggaagcctgtttgagcagagtatagccatcctgctggatatcattgttctgtgtctgatggagaaacatggtatcagcagcgatgacatgtaccggaatcacagcaatttggagtgatgataggaggtcagaatggaaaagaaggttaagataggggcggtggcctggggactgccaggcggcggaacctacgctgccaggacagccagggccgcgggcctggatggaatccagctggagttgggaagctatgaggcgggatatccgctggctcagagggaagttatggaagggtatctggaggataaagagaggtacggcatagaatatccggccctggtgctcaatgatgtgatggtcaacgaattcatcaacggcaggaatacggaacacggacgaattgcatatgaccagatagcccttggggttgagacggccaaacgtatgggaattgacagaatcatgattcccaactttattgagaatctgattacatgcggacgccatgtggaacataccaaagacgccctttcctttgcctgcaggctggcggctccggagggaatcctgattctcacggagaacgcattgggctggaaggaacaggaggaactgctgcgggatattggggcggataacttaaaggtccattatgacacccagaattttaagtttaattttgatatggaccagtgtgaacagctggaacacctgtatcccctgatggacagcgtgcttcacacaaaggacggagaagccggaccgggcgaccggctgctgggccggggtaatacagactttgagggacagatgaggttcctgaaggaacatggatttgaaggatggattgtcattgaaaattattacaatctgttaccactgagggaacttgcgcctgaaggcaggcagatggagctgttaaggcgggatatggaatctattagcagatggtttgtgtgaccggataaatagaaagatgattcaagaactttctttttgcattaaatattgaaaaatcagatgagatgcatatcagggagatattaaaaagatattgacctccagggcttctgtcaatgagcagaagcccgctttttatatgtaagaaaaaagtcgaaagaacgaatgttcgaatataatattgcggtttacggacagaagcagtataataaagggtaccagaacccaataatagataaaataaaattacagattaagaaaataaacaaaaaccggactggatattctgcggagaggaggtgtaatcgtggaacagcggacctatattgttatagatttaaagtccttttatgcttctgtggaatgtgtggagcgggggctggactccatgacagccagattggtggtggcggacccggagcggacggagaagactatctgcctgtccatttcccctgccatgaaggcgctgggaatccataaccggtgccgcgtttttgagattccaaagagtgcggattacatcatggctcagccgcgtatgcagctatatattgattatgcagccggaatttacggcatatatctgaaatatatctcaaaggaagatattcatgtgtattccattgatgagtgttttatggatgtaaccaattacctgcccctttaccagatgacggccagggagctggggcagaccattatggctgatattttgcgggaatatggtatccgggccacctgcggggttggcaccaacctctacctggccaaggttgccctggatataacggccaagcattccccggattttatcggagagctggacgaggaaacctttcaaagaactctctgggaccacaagccgctgacagatttctggcgcattggaagggggattgccgcaaagctggaaaagtacgggattcatacggtgggggacattgccgggactgatgaagactttttgtataaactgtttggcgtggatgcggagctgctgatcgaccatgcatgggggagggagacagccaccattgcggctatcaggtcttataaggccagaacaaactgcctcaccagcggacaggtcctgggatgcgattacagctttgaagatgcaaagctgattgtgaaggaaatgatggatttgctgtgtctggagatggtggaaaagaacctggtgtcggattcagtgaccttacaggtgggatattccaggcagctggcagttgagtcctccagagggacagcgtccctggacgcaaagacaaatgcagatatcatcctggtacccgcagtgtccgccctgtttgagcgtattgccaatcctgagctggccatacaccgcattaacatttctgtgaaccacgtgattgaggaggagtacaggcaatacagcatgtttaccgatgtgcgggagctggaacggaaccgtaaactgcagacagccatgctggatataaagaagaagtttgggaagaatgcaatccttaaagggataaatctgcaggaggcgtccaccatgcaggaacggaatcagcagattggaggccataaaagcgggatttataaggatggcgggaacaaaagcaaagagcgcggcaaagagcgtgaaggcgcagaacacaaagccggagggaagagagatggcaggtagaccaagggcaaagatgtctgttcaggacagggcaaaacaattccttccgtttgcagcccttaagggactgccggaagcactggcggaaaaagagcgggtagtggtgcccaaaatcattctgacagaggacatgtctgaagaactgaaccggaaaatgcagcagattgagccgggaatgataatcggtgtggtttattttcataaagacgaatacctgaaggtgaccgggatggttgcccggttcaatatcagcagccgggtccttcaggtggtaaatacgaaaatcagctttgacgatgtgctggatattgaattttgccggtgattttattgatgccgaagagcattgcctggtcaatggctgcctgtgctttatcacggccaattcatataatgatacaaaaattaaaaaagggtttccgggcagcttcattggaaaacatcccaggatgaagaaaagagcgtcagacggcgctctttttttccgcttgcctttaacgctgtttttaggaattggcttttgggcaaagggggcgggaggtcacaggggagggggaaatgtcacagatttccgcttgacgaaatcatgttcccttgctatgataatactaacaagtgttatattgcttgtagaacaaatataactttccttgttacacaaaacgaaagatggtggttttatgttcttgaagattgatttcaacagcgatgaagcaatctatatacagctgcgcaaccagatcatcatggggatcgccacggacatgatacgggagggggatactctgccctctgtccgtcaaatggctgattatatcggcatcaacatgcatacagttaataaggcatattctgtgctgcgccaggaaggttttgtaaagctggaccggcgcaggggcgctgtggtcagcctggacgtggataagatacaggccattgacgacatgcggggggacctggatgtggtgctggcctggggcatctgtaagaatataagccgtgatgaaatccaccatctggtggatgagatttatgataaatacacccgcgggtgtatggggacaaaagacggccaggagaccggggaaggttagaaactgccggaacatgagcggcggatgtccggccgtatattcagacatgttctgtaaaaaggccagaaccgtgctgtgcagaatgtacgggtatggttttggatattaatggaggattcgtatgttatgtgaaagatgtaaaatccgggaagccacgatcaaatacactgagataatcaatggcataaagacggaacataacctttgctctcactgtgcgaaggagatggactttggccagtactccgccctcctggatggggagttccccctggggaagcttctttccggcctgctgggtctggaggacgacgaggaggagaccgatgtgaggggaaacgtagtctgccctacctgcggtaccagctttgaggactttgtggagaacagccggttcggatgcgctgactgttatggcgtatttgatttatttatcaaagataagatgaagcagcttcagggaagcgagagccataagggcaagcatcccaaatacagaagtacatttgaaaaggaacacccggaggcagccgggaactctggggaggaaacaaaagagagcacagactgtctggcggaggccggtacccaggattcccagaccgctgtggccagaaagcagatcaaggagttagactccaagctaaaggaggcagtgcgccaggaggattatgaactggcggccagttaccgggaccagattaaagaactgaaaaaggaggctggaatccatgagtaaatggtttgaggaaatagacagcaaaaactccaatgtgatatacagccgcgtccgtctggccagaaactgggatgaatatgtgtttccctccaggatgaccgccgcccagtgcagcgagatggtggaacgcctcagggagggacttaaggggcttaaggaccaggatggccgggatttaagctatagccagctggaccagatgcaggagctggagaagatggccctcagggagcgcagaatccttaacatggcctgcgtcagcaggaaggagccgtcgggactgctgctgtcagccgatgagtcgggcagcattgtcctgggcggggatgatcacatccgcatgcagatattgtcgcccggacttaaactggatgagctgtggcagaaggcggatgttctggacgattatgtcaatgaacggttttcctatgcctttgatgaaaagtacgggtatctcacctccttccccaccaatgtgggaacaggactgcgggcctgtgcggtgttgcacctgcccaccttatcccaggtgcgaaagttccagagcattgtggcggatatgagccggttcgggactgccatccgcggcctgtacggagaggggagcgacaactatggaagtctttatgaggtatccaaccagcgaaccctggggcagtccgagaaggagattgtggaattggttacaaaggcagcggcccagctcaacaaccaggaaatacgggtcaggagcgccacccttaacacccagcgtctggagcgggaggatgaggcatataagtcctacggcgtcttaaagtacgccaggaagataacggagaaagatgccaggatattcatttcccagctcatggcaggggaagaggatggactgatgaagtttaatgaggaatgctccctttacagtctgattataggaattaagccagccaatttaaatctgtgggccaaacggcccctggataaggatgagctggacactgctagggcagcttatataaggcagaacctgcctgagataatctagctctgccatgggcagcgccgggtttaacacacttgcaaggaggacatgacattatgatggaacgatatacaccgcaggcccaggaagcgcttgggctggcagtgggcgtggcggagaccctgaaccatggttacgtgggtacagagcatctgctcatcggcctgctgcaggaagggaccggagtggcggccaaggtactggaggaaaacggagtggaggaagaccgtgtcattgaactggttagccagctcattgcccccaatccaacggtacagaccgcggacaggacggcctatacccccagggcccgcagggtcatagagaacagctacagggaggctgtccgttttaaggcagcccagatagggacagagcatatcatgattgccatgctgagggaaggggactgcgtggccagccgtcttctcaacaccatcggggtcaatatacagaagctctacatcgacctgttggcagccatgggtgaggacgctcctgctgccaaggatgaccttcagggagccagggccggaaagcggggcaatgccacacccaccctggacagttacagcaggaacctgacccagctggcatcagcgggaaaactggaccctgtcataggacgggagcaggagattcagcgcgtgatacagatactgagccgccgtactaagaataacccgtgtctgattggcgaacccggcgtgggcaagacagccgtggtggagggcctggcccagatgattgcatccggcaatgtgcctgaaaccatagcagacaaacgggtagtgaccctggacctgtccggcatggtggcaggatccaaatacaggggtgagttcgaggagcgcattaaaaaggttatctccgaggtggtggaatccggcgatgtgctgctgttcattgacgagatacacaccatcatcggggcaggcggggcagagggtgctctggatgcatccaatatattaaaaccgtccctggccagaggcgagattcagctgattggagccactaccatcaatgagtaccgcaagtatatagaaaaggattctgccctggaacgccgtttccagccggtaaccgtggatgagcctacagaggatgagtctgttgccatacttaaggggctcagaagccgttatgaggagcatcacaaagtagagataacggaccatgccctggaggcggccgtgaagctgtccagccgttatattaacgacaggttcctgccggataaggccattgacctcattgacgaggccgcttccaaggtacgtctccagaactacacaaagccggctaagattaaggattacgaggctgagattgatggtctggaggaagccaaggaggaggccattaagaaggaagcctacgagaaggccggagagataaagaagaaacaggaaaagatacgggaaaagatagcccagaccatggaaaagtggcagaaggacaaggagaccagaaagctcattgtcagcgacaatgagattgcggacgtggtgtccggctggaccaggattccggtgagaaagctggctgaggaggaatcagagcgtctgaggaacctggaaggcatcctgcaccagagggtggtgggccaggaggaggcggtgacagccatttccaaggctatccgtagaggaagggtaggtcttaaggaccccaaacgccccattggatccttcctgttcctgggccccacaggcgtgggaaagacggagctgtccaaggcattgtcagaggctatgttcggtacggaaaatgccctgattcgcgtggatatgtccgaatatatggagaagcacagcgtgtccaaaatgataggctcgccgccaggatatgtgggatatgacgagggcggtcagctcagcgaaaaagtccgccgcaatccctactgtgtcatcctttttgacgagatagaaaaggcccatccggatgtgttcaacattctgctgcaggttttggacgacggtcatatcacagatgcccagggacgcaagattgacttcaagaataccatcatcatcatgacttccaacgcaggggcggagaatatcatttcacccaaacgtctgggattcggcatggtaagcgatgccaaggcagattataatttcatgaaggaccgtgttatggatgaggtgaaacgcctctttaagcctgagttcctaaaccgtattgacgagattatcgtgttccatcagctgacaagggagcatataaagggaatcgcggatatcatgctgggcaccatcggaaaacgctgcaaagaacagctgggcatagggctggaggtaacggacagcgccagagagcacctgattgataaggggtatgacgataaatacggggcaaggcctctgaggcgcaccatccagaacctggtggaggaccggatggctgaggagatgctggatggccgcatcaaagccggatccctggtggaagtgggatttgacggggaaaagcttaccttcagcgtgaaagcaaagacagccaggccaaagtcggccgccaaaccagccgccaaatcagccgccaaaccagcctcatccggggaaggttctgaggataaaagcaaggcggcggggagcaaaagcagggccggacgcgcctccggtaagaagaaggagaccccggcacccaaggcttaacagcatctgtagcagtttatacaaattaagaatattttcactagttatttttcggtaattgttgtataatttttatgaagaggttatacttaagcacaattagcaggaggataagaagatgccggtcattgaagagttaatctgcatagagcaggatggcaccattagttttggcaattacaagttaggacagaaggctaagaagtccgatttcgaatatcagggagacatgtacaaggtcaagacctacaacgagattaccaaactggagcgcaatgacatgtttgtttatgaatctgtacccggaacagctgcagagcatttcaaggttacggatgaggacgtggaattcgcggtggaaggcagcagggatgcacagattaccatacagctagagaacgatacggattacgaggtttacgttgacggtgcagccgtaggcagcatgaagacaaacatgagcggtaagctcagcgtaagcgtggagctggaagaaggggtatcggttcaggttaaggctgtgaagagagcataaaacttaagtatcatacaggctggaagcgattccagcctttttctgtcagttttttaaatattgattccatgaatatgaggaggttaacatggcaaaagcgagaaccaccgcatttttctgtaaggaatgcggatatgaatcatccaaatggatggggcagtgtcctgcctgcaaggcctggaattccatggtggaggaaccggtgtcaaagccggtaggcagtcaggccgggttagggcgcctggcttcgggaagccagaagtccccggttccggcagccagaccatccctgctgtcagagattgacatagaggagcaggaccgtatatccacgggctttggggaactggaccgggtgctgggagacggaatcgtggcaggctccctggtgctggtgggcggagacccgggtatcggaaaatccacccttcttcttcaggtatgccggaatctggcgggcgcaggccagcgggtcctgtacatatcaggggaggaatccttaaaacagattaagatgagggcaaaccgcatcggtcctgtaaccggagagctgaaattcctgtgtgagacaagcctggagcatattgagagggccattgacgctgagaatccccagattgcagttattgattccatacagaccatgtacagggaggagatatcctctgctcccggaagcgtcagccaggtaagggagtccacgggaatcctgatgcagatagcaaagagccggggaatcgccatttttgtggtggggcatgtgacaaaggaaggcgtggtggcaggccccagggtactggaacatatggtggatacggtactctattttgagggagacaggaatgcgtcctaccgcattctgcgcagtgtgaaaaaccggtttggatctaccaatgagataggtgtatttgagatgcaggaacaggggctggcagaggtggagaatccctctgaatacatgctggacggccgtccggaggaagcctccggcgcagtggtatcctgttcctttgagggtaccaggcccattcttttagaggtacaggccctggtgacggagacgaatttcggtatgcccaggcggacggcggccggtacggattacaaccgtgtgaatctgctgatggcagttctggagaagcgctgccgctatgagatgtcgcggctggatgcctatgtgaatatagcgggaggtatgaagatgaacgagcccgccctggatctggccattatcatggcccttatgtccagctacaaagaccggcccgtggatccgaaaatgctcatattcggggaggtgggcctgtcaggggaggtcagggccgtatcccaggccagccagcgtgtgaatgaggctgccaagctgggctttacagcctgtgtgctgccaagagtatgcgcggataagatgaagcctgtggagggcatacgtttgattggggtgtccaatgtgcgggaggccattggaattatgtaaaagagcctggcttgggatgggaattaggatgggaagggaggggccgatgtctgtaaagaggagttccctcccggcccgggccggaccatcaggacaggaaaaatacttttttgaaaaaacagttgacactttctcaaacctgtggtattctaattgaggttcagaaatgcaccaaacaaaaaaggggaatagttcaatggtagagcagcggtctccaaaaccgtagatgggggttcgagcccctcttcccctgctgactattttaacgaatagcccaacccgaagagagtcgaggaatcttattttataaggtttctgggctttttcttttgtataaatatataaaatcatgtcagttgtaccttttggtagaggcagctaatagctggaaaattggtagttggcggtatttataagcatacaaagtatcaccgaagtgtcgcggccgggggcgtttcacttaaaaataaagtacttgaatcctccgcctgtatgcttctgtctatccggaggaagatggaagaggcattttcctgacatcatactggttctctttaaggccaatactgatgcggtgcagataatgggcgtcatctgtatccggagcatcttccctgtagtggctgccgcggctttcatttctttccatcatggcaatgaggagggcgcggctcaggtccgtatattggtgggctttcaggaaggactgaagctgcctggggccggcacaggagtctggcctgcagcatgtatctgcaaggagggcaagggagttgatttcatccagtgtatttttcaagttttccatgctgcggaggatgcctgcatgctgccacataagctctctgacccgtctgcatataaagacagcaggaggctgggaaagggacgctggtataggggggagtgtgccggttcctgtcagtaccgaatggacggcaggctgcataggcttctttcatctgcgtgccggcctgggtcagcgtgactgatatgtgggatatttccgacgcataggagctggcgctttctgccgccagggtgccgaatacgagacagcttcctgaggccatgccccccaatcggtcagcgccatggatgccgcctgctgcctcgccgcaggcgtacagtccctttacggacgtggagcaattatggtccacctgtatgccgccattggcagcatggaaaaatggggcaatggaaatgggatctcgctcgatatgtatgtcatgctcccttaagagctagctgatgtaatcgcggacatagccacggctgtcattcaggatatcaggggaataccgtatgatgcatcctatggactggtccatggcaccgcccctggattcgatgttcttaagggcggatttcatgagggctatgtcgaaatacttggaagcgtctgctgtggtgaatgggccgtgaggttctctgagcagcaggcattcaccacaggcgtcctggttgggcagcagctgccttaagatgtcatggccgtccggtccaaggagtccggtacagtaccggaggcttccttcacggaatacagttttataggcaggagacaggaatccggggatgaactggttgaattccagattgatgagcctggctcctgccttcaatgcaattacatgggtgcttcctgatatgtcagcggtattcagactgtgcagatacagattccccataccaccgctggccaggatgactgcctttacagacaaggcttccagaccgtccgggccaagaaggatggcgccgtttatacggtcttgtgccgtaaggagctgtaccagttccctgtgttctgccacagtaatgcgctccaggcggtctaagacattcctgacttcctcgcgaagcctgtcccaatcgttccaatagtataggtcccgctctgtatggccgaagcaggccagtttccgctcgggcagtttatggcagcggatgccggtctcagccatgtgcttcaggcattcttcaatgtgctccacataataccggctcatccacggatcgttcatagaccagctgcagtccttaatatccttcatgaatgcttcccggtcatccggcccggcagtgcacaggcagtggatggtatcaatcattggataaaagctggaaccggaacacagcctggaaggcgtggctaaaagaacccgcatacctttcatggcacagctgaccgctgcacgtatgccagccagtcctgctccgtctaccagtatgtcgaacgggagttcggtgtgtatcttcattttcatggacagcctccatcgtatttacgtttattggcaggtatcattttccggtcgtgggttcggagccgctggcccggtatggtcagcgcttgaaatatcctacattgaaatggaactgcatggcgtcataaaaatcagaataactgccggctttcaatgcgttgaagatacgctggtgtttttcaacggtaagttccatgttgctgtgggtagtctttactttatagtaccggtcacaggcccagaaaaactctataatggactttaacagccggttatccacatcctggaacaggattttatggaaggcggcgtcggtttcggcaaatttcacgccgtatacggaggagtgggaacgtttaatctgattaaacagttcctccatggtaaccaccttttctgacagaagcgcaatgcccttttctgtcatgcggtcaaatgcatcttttgcgaatcccagttctaggacgcgcctcagttcctcaatttccttgtggagctggtcctcatcactgatactgtatatgagattgctcaggaagaaatctgtattaaattcctgaatcacgatacccacgccgggagtggagtggaccgccccggttatctccagggatttaatggcttcccggagcacattacggctgactcccagcatctcgcacatcttcatctccgatggaagcttgtcacctggcaacaggtgatttttttctatgtagcttttgatttcgtcgtaaacctgtaaatacagacgccgggacttgaggtttttcataccggtagattctgccatgtctgatattctcccttaatatgtaattgttaaaataataatttataggactatcatatttcatcatgaaagaaaagtcaatacggtatacatatataacaaaaatatatggtataaattatatattatacacatatatacaatctaaacattttaatatattgacatatatgtcagattaacgtacaataaggctgtattgattaataaatacagcaacatgccacatactttgtagtacaaagtacaaatataaaagaaatggaggttacgtagtatgagaaaaagaagattggcgagcctgttgttggcggcatcccttgcagccagtgcattggccggatgtggttcgggaggaaagacggaaaccactgcggctgcggcaggaggacagactgaagcggcaggttccgggacatcaggggagaccggggcggcaggcgggaccagcgcggctgaccttgggacaccattggcggatgtcagggtaaggcaggcccttgcctatgccattgacatgaatgccattgtggacagtttgtttgagggtaaggcagaggtggctaagagctttacagctcccggtgactggctgaatgccggcatcccggtatatgagtataatccggaaaaggcaaaggagctgttaaaggaagctggatggccttccgattataccctggatgtggtttactattatgatgaccagcagaccgtggaccttatgaccatcattggccagtactggcaggaggtgggcgtgaaggcacagttcaggaagctggaaggcgatctggcggcccagctgtgggtaccgccggcagatatggagaagggtccgtcagcagtgaagtgggatttagcctatgcggcagtggcagcccttgccgagagcgagttctataatcgttttgcatctaccgcatccaataactcttccgttcccaaacaggaagggctggatgagatgattgcagcttccaacgccaccatggatgtgggtgagcagaaggaggcattttacaaaatccagcagttcgtggctgagaatgagctggccatgcctctgtaccatcaggtatgtttcatctataccagcgataaactggatacggcaggcagcgcctttggcaatgaccagttctcctacgaaaagaacatactggactggaagattgacagggatgaccgcaccatgtacaccaacggaggacctcaggaattcttctggtatcccatggtcaatcccgggtatatgattaatactgaacttgtttttgataagcttatcaatgcagacagttcattaaatccaacagacggcatgctggctgaaagctacacggtttctgaggatgacaagtcgattgagtttgttctcagggacggccttaagtggcatgacgatgaacctctgactgctgaggacgttaagttcacactggaacttatgttaaagaccccaggtaccaatgcagtggcatcagaagtcatgaaggcgatccagggcgcccaggatttcctggacggcaagaccgataacctggaaggtgttgtcattgacggcagcaagattacagtgaactttgacacggtttcagccaatgcgctggctgtattctcacaatggccaatccttccaaagcattgtctggagaatgcaagtcctgaaacccttcagcaggatcagttctggcagaaacccatcggatccggaccatttaaggtggatgaggtggttctcaacaactatgcgaccctgaaacgctgggatggttattataagacaggaaccggtaacattgagacaatttacatgtttgccagcggtgagaatgacagcaatctggttaagaacgcaggtgcaggtaagattgattatgcatggagcaagtccacggatgacgccaaggcaatcgaatccatggatggaatgaaggtttcaactgccaacatcagatacaccaggtgcttctacatcaatcagttccctcatgaaccaaatattaagtaggatgattggactgcggcgggccggctatttgacggtccgccctgtttcttagaggagacttcgacgaggaggatttgaattgagtaattatataatacgtaaaatcctgacacttatcccaatgatgctggttatcagcttcctgatatatctggggatggagctgatgccgggcgacgcagtggacttcctgattcctccggacgccctttcaaccatgtcgccggaacagctgaatgccatgagggatgccctgggcttaaatgatcccttttttctgcgctaccttaaatggctggcaggacttgtgcggggggactttggctacagccttcagagcggcgtgccggtgctgaccctgatgaagaaccacctgcctgcaaccatagagctgaccctgacttccctggtgatgtcttccatattcggtattctcctgggggttgtatgcgcccttaagaagggaactgccctggatcagatactgagcgttgtgggtatggtgggggttgccatcccccagttccttctgggactgatctgcatcaacgcatttgccctgcataccagcattcttcctgtaggcgggaggatggcttatgcgggccagaatttcatccagcggcttccataccttattatgccggccacagtactgggattttccctgacttccggtgtgatgcgttacgggcgttccagcatgctggattccatgggacgggattacatgaaaacggccaggagcaagggactgccggagtggcgtgtgaacctgctgcacggcctcagggccgccatgacgccggtggtagtgctcatcggattccgtctgcccatgctcatcggcggcgccgtggtggtggaggaggtattccagtggccgggaatcggcgtattgtttgtggatgcggtccgttcccagaacacgcccctggtaatgattattggttttttcagcgtcctgttggtattggtggccagtattgtggtggatatcattaccgcgctgctggatccgcgtattaaactgagttaggaggtgcgggatgaaacattcgcttgacaggaaaatggaccggattctggaacgggagaactccggcaggataaaaaagggaatcaggaaccgcgcgctcaggaagctgtttgccaaccggctgtcagtgctgggatttatcatatttatcgtgatacttgtcatgtgcctgggtgcgcctttgtttacacagtacagcgccaccaaggtggacctgcgcaatatattaagcccgcccacgtcttcccacatatttgggaccgacaagataggaagggacatatgggccagaatcctctacggaggccgtatttccatcggcgtggggctgggaagcgcacttgtggccacagtcctgggtgtatcgctggggactatggcaggttataagggcggctggtttgacgggatcatcatgaaggtttccgaaatactgatgtcatttccccagattatattggttctgattcttgtgaccattacgggccagagcctgtggaatctgatattcattttttccatcacaggatggccttccatgtaccgtatggccaggtcccagatgctgtcgctgagggaggaggagtatgtacaggctctaaaggcttttggtatcggaagcatgaggattgcctttgtacatatgcttcccaatgccataggacctattttcgtaaatatcacattgtccacggccatgtttatcctgcaggaggcatccttaagctttttggggcttggggttccgttagaggtggcgacctggggcaatatcctgaatgcggcccaggacctgatgatacttaagaactcctggtgggtatggctgcctaccggtatcgtggtgacactgtttgtggtaggaatcaactttatcggtgacggcctgagggatgccacggacccgtcacagattggttaacagccatggagagaaggagtgtgatattacagtatgaatgataacattgtattaagtgtccgggacctggaagtgaatttctataacaatgagagatgcaacagggtcttaagaggggtatcctttcagctgcaaaaagggaaaatcatgtgcattgtgggagagagcggatgcggcaagtcagttactgccaattccatcatggggctgctgcctgacctttcaagaattgagaaaggggagatacatttcttccacaacggcagggatatacggatagaccagttgaaacgcaagggaaaagagatgcgccagattaggggagacgggatttccatgatattccaggaccccatgacggcccttaatcccgtatttaccgtagggtatcagatcaacgagtcccttttataccatgacagggcaaagactaaaagcgaggcaaaacagaaggccatacgcctgttaaaggatatgggaatacctctcccggaaaaacgggttgacgaatatccataccagttttcaggaggcatgtgccagcgggccatgatcgccatggccatgagctgccagcccaaggtgctgattgcggatgaacccaccacggcactggacgtcaccatacaggcacagatatttgaactgatgcaggaccttaaaaataataatgacgcggcaatcctccttattacccatgacatgggcgtggtggcggaactggctgataacgtggctgtcatgtatatgggcaatatcgtggagagcggagatgccagggctgttctgacccgctccgcacatccatataccagggcgctgcttaaatccataccagtgctgggaaggggaaaaaagcaggagctggagcctataaagggttccacaccagacccatatgaccgcccaaagggatgtcagtttgctcccagatgcgggtatgcaacggagcagtgcatgcaggaaatgccgccggagacggaaatcgagccggggcatttctgcagatgtttccataatctgatggggaaggagggacagccggatgccggaaactaaggatgtgttgattaaagtcaggaaccttaagacgtattatcctgtaaagcagggagtgtttaaacatacggttggacatgtgaaggccgtggatgatgtgagcctggatgtatacaggggagaaatcctgggcgtggtaggtgagagcggctgcggcaagaccacgttgggaaagagcatcctccagctcataaagcctacggagggaagtatacgctatgcctttgagggcggggaaaaggaactgattggcatgaataaaaaggagctggatgaggccaggtgcaagatgcagattgtgttccaggatccctactcctccctgaacccctcctttaccatattcggttccatgcaggaaccattaatccgttttggtgaaaaaagcaggaaagcccggcgggagaagatagcaaagctgttagaggccgtaaacctgcctgcggattacatggaacgctatcccaatgagttctcaggcggccagaggcagaggattgggattgccagggccctgtctgtatcgccggagttcatagtctgcgatgaagctgtgtccgctctggatgtatccattcaggcccaggtgctgcagctgttaaaaaaactgcaggaagagcgggggcttacctatatgttcattacccacgacctgtctgtggtggagtatatcagcgaccgcattgtggtcatgtatctggggcgcatggtggagatggcggatacgcaggagctgtttgagaatacgctccacccatataccagagctttattaagcgctatccccattgcggatatcgacagaaggagaaagaggataccgttacagggagatgtacccagtccggtgaatccgccttccggatgtccttttcatcccagatgcccggagtgcatggaaagatgtaagaccgaagtcccgcatccggtgctcatcaccagggatgggcgggaacatatggtgtgctgccatcgggtacaggcaaatgcaggcagcgggaatggattttaagacacatatataatcgaagaggagagagaaatgagcagatttgagatgaatcagatcaagggggtcatccctgcaatgatgacgttctttgacaaggaagagaacgtggatactgagtgtaccagacgcatggtggaattcatgctggagcatggcgctgacggtttctatcttacaggcagcaccggcgagtgctttaccatgaccatggaggagcggaatctggtggtggatacggtcattgaccaggtgaagggacgcgtgccggttgttgtacatgtaggggatatcggcacgaagaaatccatagagcttgcggagcatgcctacagggccggcgccgatgccatatcttccgtaccgccgttttactggaaattccgtgccggggatatctataattattacagggatatatcggagtccacccctcttccaatggtggtctataatattcagctggcaggacttatggatatggacctgcttctgcagctggcaggacttcccaatgtccatgggcttaagtatacggccagatcccacgatgaaatgggattcatcaaggaaacactgggaccggatttcatgatatattcagggtgtgatgagatggctttttccggtatgtgctcgggcgcggacggaatcatagggtccttctataatttgttcccggatttatataagcagatccttaagaaggtggaggaaagcgatatcaagggaggcatgcggctgcagcggattgcggacgaggtgatatttgctgcgctgaagtatgatttcccgtccgtactccacaacctgatgaattggcgcggtttggaatccggatactccaggagaccgttctacaattaccaggattcagagctggagggccttaaggaagatatcagaaggataaaggacagataccaggcagaagagctggatatgttcaggctgtaaggagggacggtaagaatgagtgggagtaagccgcagcagagcatattggaacgtatcagaggcggtttgatcgtatcctgtcaggcgcttccggaagagccccttcacagttcctatatcttgggaagaatggcttttgcagcaaaggaaggcggggcggcaggaatccgggccaacacagtggaggacataaccgagataaagaaaacagtggaccttcctgtgattggaattatcaagaaggattatgaggactgcgaaatttatatcaccccaaccatggacgaggtggatgcgttggcagcatgcggggcggatatcattgccctggattgcaccaggcgtctcaggcccggtaagaggacgctggatgacttctttgcccaggtacgtgacagatacccggaacagttattcatggcagactgctctgattatgaagagggaatgcatgcggctgagattggactggacctgatagggacgaccatgcatgggtatacggattataccaggggcgcggtcctgccggacctggacctgatgaaaaggctggtgcaggagtgcgggcgtccggtcattgctgagggcgggatatggacgccggcccagcttaaggccgccctcgatacgggcgtttgggccgcggtggtcgggacagccatcaccaggcccagagagataaccaagcggtttgtggctgccatgaaacagtaaaaagtcaacagaaagaaagaaccggattccatgatacagaaatgcacccatggctgagaaaattgattttcccggctgtgggtgctttttaggcaccggatctggtctaatccgtattattcataaaatcataggtgctgttcctgtaataataccgcacaaacagaaagctgagaagtgttaccaatgtagtaagtataccgccttcgataccgaatccgcccccgtttagtatattgtcccgggtaaaatgagtggttatgataccgggaatgttaaggccgctaacaggcattccgtagataattccctgaaatacattccacgtaaaatgataaccaatacacatccatatattgccggatttaataaacatatatgaaaaaagaatccccacaattattatattaaagacggaaagaagcgtcacgctggggtttcccagatgtatggccccaaagatgacggagggaaggaagatgaggacgaaaacatggttacggcatctgcggagtacagccatgatgaacccgcggttcagcacttcctctgcaaaggccaccaatacaaaggcgaataaccaggttaaagttaaagcagtaacgcggggctgccaggatgcgacatggccgcctccgaaccacaccaccaatagaaagaccagcgtacaattaaccatacccagaatcatcccggctccgcattctttttttgtggatttggaaggatgcaggcccatttcgctcaaaggacgttttataaaacatttccaggctatgataggaattattatcatcatgacatctgtcaggatcagcatcgccaccggcaggcaggcgtcgttgacccagttggcaagaggggaaaaatagtctgccgcccgattgagatcacctgtggcagttaatattacaatcagggcagtcaggaccagaaaggatgcgaaatacagcagtgcgtaataaagcagcatcacaatgagaatggtccatccggagcgtaaaaatccatttttgtttttgaatattgtcttgcatattgagttgttccatgagtgcataggctgttatcctttcggtcatatgttaatgaggttcatattacgagtttgctttgtaaaggattgaaagaattcgtttcaggtatttgtttttattatggctgaaccatatcatggtaattccctgtttgtaatggtagctgtccggcagtttgtagctcaccgtgggctgatgactgagaagaaaatctgcggttctgttaaggtgatggtgtggagcttaatagatggatttgatatatttgtatcagataaaataaatcccaggtcagtcctcattgcatctgagatacagctgatgtgaccattctatcaaaagtcatgtgtgttggctatcggaaaagttcataaaaatcatttgaaaattgaatgatatgaattctgccttagttatccctgtgtattatatttcatgagccagtttttgttttggctcacataatgcagggctggcgcagggcggctgaaaatcagctgttctgtcaggccctgttttttgtattgttaagattaaaacaattcagtcatagctttattaactgcattttggtataatgtaagagggttagggaaatagaccgcgctgataaaatggtaagaagcaatgccagaggagactaatatgaccggacaaattgcagatgtttatgaatacaacggaaacagatataatatagtggcaattaagggaacgatgaattttgatattcatgagctggggtttgaacccgtgcctatccatacggcatgttggagaggttatcattgcatttataatataacggaggaaggcctgtttctaaaagatttatttgtaaacgataaaaacggcagctatcctcctgttaatggagtggaaccagaggaggacaggtttgacggcaaggtatatcatggtatcaacattccggtgaaatttgacgggggtattatcattgggaatgactttctgacacgatattatattcatatgggattccagcgggtttatgcatataagacagtatatgagctgatttttaaagagggccttataacaaaaaagacagacctttcaaaagaggcagctttaataagaacagaaatcgacgagaagggcattgacagggccaatatttctaagttcgtacaagagagtttttcgttggattacgaagataaatggactgtttattgataataatgacagggaaacactgcttgaattaataggaaaaattaaaaggaaaagaaagcggggaggctatgagtcatacgaaagagtacaggggcgaaaagatagaggctggtcttaccgctcgtttgattccgcccggcgcgcagtattcggacagcttctgctggcttatattgactgagcgtcacttatatatactggaggataattatgatggcacttataacgagctgtacgcttttttcattgaacggatacaggatatggaggcgcaggtaaaaggattaaagtataaaaagtccgtgctgggagaactgttttccaatggcattttgtcgctgtttggagggcttctctatgcttccgggaaaaagaaagaagacaatggggtttgttttgtcattacatatgatgacggtatgggaaaatgtaatcagttgtattttaaagatttgcagacaaattcaaatcacatggtaaaggtgtatcatgcattgaagaaatcctttgataagaccattatgaggtgaggtggcggatgatggatggtcatatatggtttgttggctggtatgacggaggggattaccatgagataaaaatcactcaaaaagaagtggataattgcggcacggccgggtgcggtctgaattccattttatattatatcgggggtaaatacggggacgaagctttatacaatatgatttatctgcagtccattgaaccgtttgggaccaatggtatttttcggatgtgtgtgacggaccccattaaagttcatcctgaatttcaaaatggagaaatatatttagttgactgcaacagaacattgatttgcggcaacggggatgaattgtatatgaggctggtaaaggagaagggtgatatcacatgatggaaggcccttcttttttctgttcttgataactgccgctgatgtatgtctatggcctgcaggcgtagctatgatgcctccaattagagacctggcattcttatatatatcactgcgggagggtctgagccttgatataaaggccggaaagagggacatgaaattagactgtaaaattaagacgggatatggtaatatatagataactgcttttaaggagatgttatgagaaagggattttggaagcaattatcatacgaagataaatttgatagaaaatacgcgtgctgggcagtgaatcataacggatggagaaagcgcaagcgtttgaacaggagagctgccaggcgtgcgttaaaacgattgaatgaggaaagctatccggcgtaatatgcatggcgggaagcggtttttagtgatgggaagggagtgacaggagatggcagatataaaatatgatattataaaagaaattggcgtgttatccaaaaatgcaaaaggatggcaaaaggagctgaacctgattagctggaacggaggcgcagcgaaatacgatatccgtgattgggccccggaccatgagaagatgggaaaagggactactctgacagaggaggaaattgagaatctgaaagagatgctggaccagctgcagccttaaatgcagtatccggatacagggacccggagcggataccataagcgcaggggcagaggggggatggcctatcatttacataacaggagactgccacggagaatataccaggttttcaagggttcatttcccggaacaaaaggaaatgaccaaggacgactatgtgattatatgcggggattttgggtattgggatgattccggagagcagagatactggcgtaagtggctgacagaaaagagctttacactgctgtgggtggacgggaatcatgagaattatgatatgctgaaaaggattccggctgtttcctggaagggcggtaaggcgcagtttattacgccgtcaattatccgtctcatgcgcggtcaggtatatgatatagggggagtccgtttttttacctttggcggtgcggccagccatgatattgacggaggtattttagagccggatgacccggattttaaaagaaagaaaaaggaactggacaggggatggaagccgtatcgtgtcaatcatgtgtcctggtggaaggaagagatgccatcccgggaagagtatgatgaaggtctgggaaacctggcaaaggcaggcagaaaggtggactttattgtaagccactgtgcgccggcccatgttcaggatatagttacggacggcttatataagcatgataatttgacgctgtatcttgaatcacaaagtcagactgtttcgtttgaaaaatggttttttggccattaccatgataacaggaatgtgctggataagtatatcatgctgtatgagcagatcatacggattgtttaggccgtggctgctgttggcggcatccctgacagtatcggtaacagaagcgtttgtctgacaggaatcagtaaggaggaaagccatgctggaaagatggaaaaaacagttgttttcagaggacgggatgaaagtagtcaatgttttgtttattctcctgtacctggtcagaaatcccctttttactatttgtgcctatacggtatggtttgtttatttggtatattctgtcaggcatacaaagagtaagggcatgaagatattttattccgtattaagtatgctcgcaatggtaaccgttttgctcaatgtttattttaccatcttataaccaggagttacaggaaagaaaacaagagaactggtgacagaaaacgaatgcccgaaaggaatattttgtgaaaacatataagatttaccaagtggattcatttaccagggaccggtttcatggtaatccggccggtgttgttcccgacgcaaaggggctgaccgatgagcagatgctgagcattgccagggaattaaataactcggaaacagcttttatatttgaagcagattctccggattatgatatagaagtacgcttttttacacccacaacagaagttcccatatgcggccatgccacaatagccgcccattatgtccgggccaaagtaacacatatggaaggcggaacggttgttcaaaaaacaaaagcaggaatactgccagtggatgttgtccgcacccaaaatgactactcaatcacaatgacccagggaacgcctgcaatatctgcgccctttggggatgctgtaagagaacggattgcggacgctctgggaattactcatgaggagatttgcagggaatatcccgttgcggttgcttccaccggccattccaaggtcatggttcctctttattcaaatgaactgcttcatggacttcagccggatttgcagaagctgacaaagattagtaagcaaattgaatgtaacggatactatgcctttacactcaatccgcagaatagaattttggtccacggaaggatgtttgccccggccatcggaattgcggaagaccctgtaacaggaaatgccaacggtcccctgggggcatatctggtgcattttaatattttacaggatgaagatgcccgctgcttcgactttgacataatgcagggagaagcgatcaaacgggatggcacaatgcacgttcatgttgaaaaagagcacggaacgccgaagctggttcaaattacagggaatgctgtaattgctttttcaacggagattactatttaagcatatgataaagagctggatttcctttgattagggttaattcagctttttaaaatggggtttatgttcagcgggcttttttcacagcaggtatttatgatgtctgcttatctgcattctccggaggacagcacagcgcctgatgtgccgcgatggtggctaacgtatcccccaattgcataaatatggaactgataagggcgatttcttccgggctcctgccttctgcaatgcagcaggccagcgtggagacggaaagggcaagttcacaggactgcaagacaaatcacctccttgtggttatttgataggcgggtatcggaatggagaattccggtatgcctgttgcatagggagcaatttcatactgctgataatatatgactatatatccgggacgcagaaagaattgattttgattgaacatagttctcagaagatatgggtaatcttcaaaataagaacctggagtttcctttaagcgttctgcgatttgctgttttatggacgtctggaatcccttcagggtgtcgggagtaagagaggtgatatcatccagatgcagctgtctgccggtactgaaatcccatgtgtccgatgtacgcttcacttcctggtgtgcgccgcccatgtaggtgtaggtatccgtataaagactggtaatgcagccggaattataggttatctgataattcatatccagggtatagcggttaaagggaggataattggccggaatatatcgggcacgttcggccgcctgagggtagaggacggtacggcagtattgttctgtattttctgcaagctgcatataatagatatttgctgtccgggcagcagataaaacacaggtggttgagaaggacggataagcaatatgataggtaaataccggtatgtctccatacagcatggtgtcgtttaaggttgactttctgattgtctgcacattgttttccggtttaagtagttataaatagtatattcataaagcctcccggcatgacagtgttaaacagaaagcgcggtatgcgcaggaaatggctgttctgcataaaacaagggccatgtgggcaataaaatctatagtggctttacaggctgaattttggtataatatagaaagtttattataaaaatcttatgatctataaaagtatgcgggtttggaaacgcaatggaggtagtacgattgtcgacaaattattatatttttaaccggaaaaaacgggaagaaatccaggagtttaacaggttctgggaagaaacatttattccaggattaaaacagcaggtagaagattactgcagtaagcggaatggaacctatgtcaacacggattttgggaatgaaataatcgaagaaaaaatagccggtatctcgggcgcgccaggtaaatccgagagctacgaaacggttataggcgtgtcccactggaacggcaaacggaacctgttccagtgggaaggttcttatgttgaggaacatattatacgtgatgaggccagcctggtggaattctttaacagtaagatgaaccagcagcaatacagcattgtggatgaatttgataaggagtatacacttgatgcgttcttacatgcaataaaatacggaggggatgaatcggcttcctgatgatttaatacaaagatatgcattgcattgatgcggatacgtgaaaagcgggtccgcattttatcattttggccgcgcaaaccagaccgcgggaaacaagtcccggaaaacaaatgttcggattctgtttgacaatatcaaccgtgtttgatatacttcatgtatcgaacagatgtttggaggcgcgtaatgtcaagaagcagaaactatgcagtcagatgtcctgaatgtggttctgttatgccatttgaattatatgacagtgttacatcatccctgaacccggagcttaggaaacagattctggacggccggtttgaaacagtagtatgccctgactgtagggctgtgtcatacatacagtatgatatgttatatcacgaccctgccggaaggtttatggtatgtgtggggacggattattcggaggtgcttggccagtctgattgtccggaaggatacaggctgagatatgtggatgattataaacagctggctgagaagatacggatttttgaagcgggtctgaatgataaaatcatggagataacaaaggaggccatgcgccatatggcaaagaagaatctggagttatactatgcgggaagcaggagaaagctcatgtattttaccgtaccggggaaagagaatcatatagctgtatcacagggcctgtactcactggccgggaaatattatgataggattcccgtggaggaaaagcgcggattcctgcggattaaccggaagtatgcggaggcgttgaagaagatagaggtatgatgatataatcagagtatcaggatgatttgagatagaggagcgcgggatggagcgcaaggtgataaagttttttggggcccggcatatatacaggcagagatgacatggaggcattgccgtcagtcagataccgcagctgataccgttcatccatctattgccagaaacatagatttgtgatagaatccttatgggataaaatcaagatatgcactgcagcaggcagggcggaatggagaatacgaatgaaagcatttgattgcgttaacaagcaggaagttgaagttaccaaggaaggtctgattgacttcatgaagaaggaccgccagattgatatgaagtttgcggagaagagaaccgatgatatgggatatctgacctgggatgccgagaactggacctgtgtggacggacagaacaagtttatgcgctgctactcactggagggccgtgtgctgagagattccaccagccacaacatttacgatatggaaaatgacttctttccggagcaggccatggagattcagattaactaagtatttaaaaaagacagcggcggctgtctttttttaactcctgttttaacttcttaacttcactgcccggtaaaagaggagcagccagcgggctgttcccgctggctgagtattatgaaaaaaagttattagcattgaccttttacagtgattagtatattcaaaatatgtgagcagtctgttgcaaaagtatgaacggtttgtaataagtttatgaatgaaataagaatgtgcatattgcacaaaaatcgggctggattattgaataaaaaagccaatagactaaaaatattttagggtatataattaattttgtattaaatattggtgctattcactatgtatatcctgagaatcggctcagagtttctaccaactaccgtaaagagttgactacatggctttttgtagttggctctttttttgcagttaaagatctgctggcggagggggggaagtgaggtaaagcagctggagaccggctacaagggatagcgacgtgaggaatctgatcacattacacagattaaaacatgacatggaggacatagcattgaatcaaaaaacaggatgtatagaccgcttttttcaggtgtctcagaaccattcaagcgtcaggacggaagtgcttgcaggaatcaccacatttataaccattgcctatattttaattttgaatccacagattttagcagacccctacgtcatcatgggagatgctgccatggcagggaaaattgcaaacggagtatttatcggaacgtgtattggagcttttatcggaacaatcctctgtgctctgtatgccagagtgccttttgctcaggcgcccggaatgggattgaacgcattttttgcatatacggttgtgctgggaatgggctacacatatggccaggctctggtggttgtgttcatctcaggtgtatttttcatcgtgataacagccatcggactgcgtgaggcaattataaggtccatacctgatgcggtaaagacagccatcaccccgggaatcggattgtttattactatcatcggtctgaaaaatgcaggcattgtgatttcaaatccagccacccttgtaagcctggtggacttttcccaatggaaaatagaaggggctgacctggctctcatgagcagcgctctggttgcgctggccgggctggttattatgggaatgcttcatgccagaaaagtcaagggctcaattcttttgggcattgtggctgccacactcattggaatacctcttggagtgactcatatttcaaacctggatatgaacatcggaatgaaattcagggattttgcagaggtatcatttatgaaaatggactttgccggattattttcaggatccaatatggtggagaccatctttactgtaaccatgctggtcatcagcttttcgctggtaaatatgtttgattccatcggcacacttctgggcgcagccaagcagtcgggcatgattgatgaaaatggcgaggtgatccggatgaagcaggcgctgatgtcagatgctatttctacggctgccggtgctatggtgggaacatccaccgtaaccacagtggtggaatccagcgcaggcattgcagccggaggacggaccggacttacaagcctggtaacagcccttatgtttctgggagctattctgtttgcgcccattgtaagtattgttccggcggctgccactgcgccggcactgatttttgtgggtattttaatgctgggaaatatcagggatgtggatttttctgatatgagcaacgcacttcccgctttctgcaccattgttttcatgccgtttacatattcaattgccaatggcgttgcattcggactcattacttactgcctgatgaagcttaccactggcaggaggcaggatgtgaaggtgctgacgctggctatttcggtggtgtttgtggtaaggtatgcatttatgacactgggatagccggagactggtgggaaagaggtaaaacagattacaaatcagagaaagatatggtaaaatatagataatccatgggccatatcataatatagccctgaaaagggaggagccagtgggatatatcccactggccgagtattatgaaaaaaagtcttataagcattagctgtttacaatattaagtatatccgctaattatgagcagtctgttgcctaaatgtgaacagtttgtaagtagtttgtgacaaaaatcatgcaaaattcttacaggaaataaccatgagaacataaggggcaggaggaatataaatgtggggcagattgaaacaatttctgggagtcattccggatttcactgattctgaagaggtaatccgtgccttgcatggtgacgtggttaaaagaaatttcctttttcacatattcgttattatgtttgaatgtgtgatggtcatttccatatccatgcgtccgggcgggccctttgccaagccccgcagagtgacatattttgttttgtatctggtccttatactggcagcggcaggcgttacatggctggaagcatggattgacaggaagaggcaggcagatttcaggctgtattttcgggcagaggcagcatttctcgcttttttcagcctgtggggagtggctgtcaccctcaacgaccagctgggaggaaatggacttactgtttataattatgttgttttaatcctggcaatcatgtccatgatgaagccgtggcaggcggcgtttttgtttttggcggactttatattgctcaatggcctgctcccctgttttccggatccggccggattggacaacagtttcaataacctgatgaacagcctgttttcaaccctggctgcggcggccattgcagccagcctgtataactctaaattgcaggccaaacgaaatgaaatcatcatccgcaggcagtaccggcagattgaggcagccaaccagatgctgagccaggaggcgctgtcagatgccctgacaaatcttggaaacagaaaccgctttgagaaaacaattcaggcttttgaatttgataagcaggggtgcgggactctgggctgtatttatattgatgtaaacggcctccatgagattaacaatcacctggggcatcaggcaggagacaggatgcttaaaaccatatcggacatcttcctggaatattttgattcccaggatatttttcgtattgggggagatgagtttgtcattttgtgtaaaaatatgggacgccaggagatggtgtgcaggatagagcaggtttgcaggaagacagaggaggcaggtttttcactctccacaggactggaatggcgggagtcggatcttggcattgaggatgtggtacaaaaggcagagagagccatgcaggagaataagaaaggcttttattcttccaaggggggagagcggcagaggcgtgaactgaaccagcatatggaacggcttatatctgagaaaaaggatgcggaccggttcctcagcattctggctcctgtgtttgagggtgtgttttttgtgaatctggagacggatacagtgcggcaaatcttcataccttcctatttccatgaaatgctgaaggaatgtggtgacaaatacagcaaggccctgctgctgtatgcagatagaatggtagaaccccaatatgcttcgttatttgagctttgctgtgattacagccgtcttgaagccatgctggagggagaggagatacctgattttacttaccggaaaaaggatgggagacagctgaggctgagaatcctcaaattctatcactatgacagcacaggcaaggaaaccttatggattttttctgatattgaaatcaattatattgaatcatgacggttttataaaaatggttttatgaaaatacaggggcgctgcagtggtcattcttggtctgctgcagcgcccccaaatattactcagtccatggttaataagttagaacgaggatgtctgaagtcggaaattggaacctgaacgaatcagggcaactgtatagtcctgattctgccggaagttcatccaggtatctaccagaggcgagcgcatatcgtttccctggtaaaccgtaatgcggtagcgtccgggaatcacattgtatatacgggagtactgcaaatagttcagattggacaccaccaggcggttgttcacgtagatctgaatcggtccccggacagatgcattgtagaatctgacgcgggcaggggagagcggaagaacgatgccgggcaggattgtaccccagttccaggaccagtcggggcgtacaggcggaataggcctgggaggaacgggtctgggaggaacgggtctgggaggaacgggccggttaggccatccgggtctgtcgggaatggggcgtccgggtctgtcaggaagcgggggaaccggtctgtccggccgtccgggcctgtcgggtataggaggaaccggcctgtcgggccgtccgggtctgtcgggaatggggcgtccgggcctatcaggaagcggggcaaccggcctgtcgggcatagggcgcctgggcattgcctgcatgggactggctgccctgtcctgcatgtcaaaatcatcctcctggtctgaccagtcgctgccatcttccggaagagggagaatgggggtggtttcctgggagttcagccattcatcggaagtgtagggctccgaatcatattcagaatatgcagcggctgaattaaagtcatcctctgatgtggacggataataattatcgttatacataaggtaacctttcataaatatgctttgtcatatcttatgcgcggaaaaatattatgtgcgggaaggcttgattttcggaatacaaagacaagtttcaccatcaacaggcaggagaaatgcaaaatgcacaaaataaagttttcttctgacaaaactttgggcagacttttttattaccctatgctattataatagacgtaacccccccaatacattatatagtttttgctacaccccataagaaacgaaataccttctcctaaaatgaccagttccccgactggtcattttacttttatctgaagctgcatattcatgctgttttatccggttgtcacggaaataaaacccactcacatttaaaagtgcacaaaaagaagcacctaattttgaataatatacacgaaataagggtcggctcaaaaaaacagttgactttaaagtttaagggacttacaatgtgtccatgaaatgaatacgtataattaacaaaaaattaacggaaaagggagaaaaaattagaagaaatgacaaaacaatggtaaaaactgggggaaatgtaaaaaatgacaacaaataacaagaatagatattcttaaaaccatgctaatccgtatgtggttttgaaaaggattctttgcatactaaagaaatgtatcaaagtttatttttttaggccaaaattattaatacgtattcatacaccgtaaatcaaacagtaaaaggagaaataacatgttaaagggaagaattgtatcaggaaaaatagtgagcattttactggcagtgacaatgatggcgggatgtatcctgacgggatgcggcagcggggagagcggcggcctgggagccgggggcaaagaggcagaagcagccaatggacctgctgccggaaagggtgaagggagccaggatgggacgtctggaaaaccggctgaggtttctgtcatcattgaaacctttgacaatacctttgcatcttttgtgatgaatgccatgaaaaaatacgaggaagaacataaggataaaatccacattacatatctggactccaagcaggacgccaacacgcagatcagccaggtggagaaccagattctcaacggcacccaggccattatctgcctggcagtggatgccaagcagtcagaacccattgtgagggcttgcaaggaggcgggggtgccgcttattgcctttaaccgcatctttgaaaattgtgacagctttgtgggcgcggacggcgcagtggccggctctctgctggcccggtttacaggggaaaagacaggcggaaaaggcaatgtggcgattgtaaacggaattatgggccaggagaaccagtttatcaggcgtgacgcaattgtagaaaccttaggtgaaatgtatccggatatgcaggtggtgattgaaggcgccggtgactggaaacgtgataaagcgcttcagctggtagagacatggctgcagtccggaacggatatagatgcaatcctgtgtctgaacgatgatatggccatgggtacgcagctggccgtggagcaggccggaagaagcagtgacatcattgtctgcggcgtcaacggggatccggatggaatcaatgcggtcagggacggcaagattgcggccaccgtattccagaatcctgaccgccaggcagaggaagcactggaggctgctttgcagtacattcacggggagaagccggagagcaagatcatgattccctttgaacttgtgacagcggacaatgttgatgattacgtgcagtattcccagaaatagcagaaatagaagagggcgcctggcgggcagtcttccatacagattttggaaagggacagaagggaggaaaacaaatgggcagtgataccggatacattctggaaatgaaccacataacaaaggaatttccaggtgtcaaagcgttgaaggatgttacctttaaggtgcgcaggggggtggtgcatggccttatgggggagaatggggcaggtaaatccactcttatgaaaatccttcagggaatctatacacccacatcggggacaatgatatttgatggaaaaccattggagctaaagacaatctatcatgccctggaagcggggatatccatgattcaccaggaaatgagcccgattccggacatgacggtggcggagaatatttttttgggaagggaaccaaagaataaatggggatttgttgaccacaaacaattgaatgagatgacagcccgtctgttaggcaggctgaggcttaagctgagtcccaccatattgatgagggaactgagcgtgggaaatatgcagatggtggaaatcgcaaaggccatatcctttcattcaaagctgatcatcatggacgaacccacatctgcaatagcggacaaggaagtggaaagcctttttaacatcataagaatgttgaaggaagagggcgtgaccattatttatattacacataagatgtcggaagtgtttgagataacagacgagatttcggtcctcagggatggtgagttcgtgggaggggacctgactgctgacctggataacaacaagctgatttctctcatggtaggaagagaactgacggaaatgttccccaaaatctattacgagccgggagaggaattgctgagagttgaacatttctctgacggaaaacgtttctttgacgtatccttctgtgtgcatgagcgggagatgttagggtttacaggattgattgggtcgggcagaagcgagcttttagaagcagtattcggcctgcgtccccatacggagggcagggtatttatacgggggaaggaagtacatataaggaatccgcacgacgccatcgcccttggtatcggccttctgacagaggacaggaaggccagcggatgttttcttccactggatatcactgacaatatgattatgtcgaatctggaactccagaaaaaagggatgtttctggactttaaccggattaaggcccatacggaatccatgcgggccaaactggcggttaaaacgccctctatggagcagcatattgaattgctttcaggcggcaaccagcaaaaggttctgatgggcagatggatgatcaacgccccctcgattctgattgtggatgagcctaccaggggaattgatgtaaatgctaaggcggaaatccaccgcctgctaggtgaaatgaacaaaaacggcactgcagtcattctggtatcctcggagatgcctgaagtcctgggcatgagcgatcgcattgtcattatgcatgaaggccgcaaggccggggagattggaagggaagacgccacgcaggagcttctgatgcagattgcattcggggaagatgaagggaggaaacattaaaatggaaaataaagaaaaagcagcggccagccgcttaatcaaaaaatacagtattatactgatactgattgcgctcatgattgttctgacaatgattaagccgcagtttataaaaccgggaaatcttgtgaatatgctgcgccagatatcactggtgggtattcttaccatgggcatgatgctggtgatactgattggcgatattgatatttcgggaggaccgcagattgcgcttacatccgttatatgcgcttactttgccagcagggaatgtccgctggttctggccttcctgatgcctctgctggcaggattgtgctgcggtctggtcaatggtgtcctgaccgcgaaaatgaggattccttctttcatcgctacccttggcatgatgagcgtggcaaagggcctggctttgattgtctcaaagggccagcctatcagcggcatacggcctgagatagagtggctgggaagcaagaaacttatgggaatcccggtattagtaatcgtattcattatatgtgccgcagtggtcagcatcatgctgcaaaagacggcctttggcaagaaaatctatgcactgggaggcaaccaggaagcggccagggtttgcggcattaacgttgatttgaccagaatcaaggtatttctgctgatgagtgtgtttgccaccatttccggcatcttgattaccgggcgtgtaagctcgggttcagccaccaacggaatcgagtatcacatggatgccattgcctccacggtaatcggaggcgtcagcatgaccggagggtccggcaatgtgatgggggttgtgggcggagtgcttataatgggcgttctgcaaaacggcctggatttaatgatggtatcgccgtatttgcagcagattttcaagggcgccattatagtgatagcagtggtggccgacaacatgaaaaacagaaggtagaaggatagcttatgaaggcattggtcatgagggcgccgggggaatatggcgtggaagatgtaaaaaagccggttcccggctttcaggaagtactggtaagaatgcattccgtggcaatctgcggctcagacccgccccttctggcgggagagagcctgaaggacgacctgcccgcttacatgccttttataccgggccatgagggcgccggcgtggtggaagcagcgggaagcggcgtaactgattttaaaccaggggatatggtggcggccgaggcccatcttgggtgcggacactgcgctaactgcaggatggggcgttataatctgtgccttaatttcggcagcagggagcaggggcataagcagtatggctttaccgcccagggatgctatgcccaatactgcgtctatcacatacgggccgtccatcatattcccgacggcctgacctgtgaacacggagccatggcagatacgatggccacggctcttcatgggattgaatcagtgggaatcaggcccggagggatcacggccgtcatgggctgcggtccggtgggcatgtctgccatgcttttggcaaaggcaatgggcagccgggtcatactgtgtggcaggggaagcaggctggaacggggaaagcagatgggcgcggatgtggttcttgattatacggcggaggacatcggagcgcggattcacagcataagcggcggaataggggcggaccaggtgattgagtgcgccggaacagaattgtcttttcgcaattgtatcgcaggggtgaagcggggcggaaagattgcccttttgtcctcgccccgcaaatcctcttacgagattgacatgaaagccatcatgtggaacgaactgaccttgtgcggcagcagaggaaatcccaacagccaccaacaggtgatgcagatgatgaaaatgggaattgcagatccgctgcccatgataacccaccgctttgccctggaggatatgagagaggcggttgacgtatttacacagcggagggatggatgcattaaggctctgatacagctctgatattactttgcggcagtgggagcgccttaacaggccctggcatagaacggtttttgttctatgccggggtgatttttgattttctccatatttactaaaataccatactaaatttgtgaggcttgcacaaaaaaagataatttaataaaaaaaaattgacaaacagtttgagagcttttataatgagtgcatagaacatgaatacgtattaataaaatagatggaaacaaaaggcaaaagcaataaaaaatacacggttacgtcgttgattaattgcaataatgcctaatttttaccaataaaatgtatacgtattcagtaaaacaattattcataacaaaaagcagcagaaaataatgcggtgtgcggagggaggatatacacgaaccatagaacgtggaaagaggtgaagaaagatatgatatatctggacaacagcgccaccacacaggttgaccaggacgtggccgggactgcctgtgaagtgatgactgaggtttacggaaacccatcatccccgtatctgcttggaagggatgcgctggggcggctgacagcagccaggcagcaggtggcccaggtcataggcgctcctaccaggcagatcttctttacatcaggaggcactgaggccaataacctggccatcaggggaagcgtcctggctgccaggaaagaggggaggctcaggggaagaattatcaccactgccatcgaacattcttctgtcctggaatcctgcaggtcactggaggaagaaggatacgaggtggtattcatccgtcccagggacgggaggatacaggcagatgatgtgattcgcgcagtgaatcaggacacccttctggtgtctgtcatggcggtgaataacgagacaggagagcgcctgcccgtggaggagatgtttgcgggcgtgaaacagaaaaaccccgatgtactggtgcactgcgattgtgtgcagggattcggaaagattctgttcagcttaaaccggataaaggctgacatggttaccatgagctcccataagattcacggacccaagggatgcggtgccatctatgtgcgggaaggtgtaaaccttcgccccctgtgcttcggaggctcccaggagagcagggtgcggccgggaaccgagaatgtaccgggaatcgcagccttcggccatgcttccttaaaagccctcagggatataagggaaaactgggagcatgtaaaggaactgaacctgtatctgagggattgcctgcagcaaatggaggatgtggtaatcaattccccttcaggggctgttccctatgtgctgaatatatcggtgcttccctttgccacggaagatctgcttcatgagatgcgcatgaggggcatatatctgtcgggcagctcggcctgcgaaaaaggggccaggagccatgtgatccgggccatgggcatagatggccccagggctgacagcgttgtgcggatcggcctgggaaaaaagaataccagggaagaagtaactgtattagttgaaacattaaatgaattaataaagagagggaaatgatgatgagcaagattaatgaaaagagtacattaaatgttaagttgacagttaaaccgattttatttaccatgtatcatatacatgcgtatatgggaccgtgccgttacggcgagggatatgccctgacgacagaatccgacatggaagtgacccagaaggaattcgagatattcaagaaggagatggaggaggaagcggacctgcgcaacgtggaattcctggagccggtggttatcttctggaatgaggatttcgcccttaaggaggaacagattcagaaggccctggaggatgatgcaaagacggatttctatttaatccgcggtctgagaatttcttcctacttcgcagttgagctgtccaagcggacagataaacctatcggccatacccccaataaatccgccatatccaagtgcgatcacgtggatatgactgcccacctctttgccgagggaaaaccaggctatgcattcctggattttgaggagatgaaccgcacctttgcagccctgagagtgaagaaagccctggcctgtaccaagatattcttccccttaaagagcgccatgctcacctttggctgccagagctcttacctgaacctggaggatatcaccagaaagtttaaggtacggttctcccatgtgaactctgacgaggtgttccagtggctggacgcgctgacggatgaggagaaggcagaggcaaaagcgctggcagataagctggaaaaggaatctcagggcgtgcatatgccggctgaatacatactcaatgatacggaattttatgagaccattaagaaaatgatggctcattacgactgcaatgcatttaccattccctgtttcgaggtctgcgccaccagggagctgaaccgcaggagacttaccttctgcctggcccattccctgtttaaggatgagggaatcgcctctgcctgcgccggcgacgtggggtctgtgctgaccatcaccattcttatgaacattgccagaaaagctccttacatgggaaataccatggtgttagataagaacaccaaccagtgcaggacgctccacgatgtggcctgcgcccagatgaaggggtacgacgagcctgccctgcctacggagttcgtttcctttacaatggattcatgggggaccaccatgcgttacgatttctccaaggacaacggggaaacgctgaccatgattaacatgagcccggatatgaagaaaattatggttgcaaaaggcaccatcaacggatgcgacgactatcttacacctgaatgcaagcacgcggtgcgctacacggtgaaggacgcaaaacggttccatgagtgccagaagttcgtgggacatcacttcgctctcgtatatggggattacgtggaggaagtaaaggcatttgcaaaggaatgtgatttagaggtactggaagcataagcagcagaggggacgaagatgggaggaggtatcttatggatagatggcgcataaaagcagccatgggtcttgtctgtattctgacggtgagcgcgtttgcgctcaccggatgcgcccagacggagaaatcagatgtgatcacaatcaggattgcccatgacaataatgtaaacacaccgctgcacaaggcatttttgaagttcaaggatctggtggagaccgggtctgaggggcgtatggaggtggttatattcccgggggggcagatgggcagtgtccaggatacatttgaacagtgcaggcgcggggatatcgaaatgagcggctccaccaccagcaactttacaagggccatgccggaattcgccgcatgggagagcttttacatgtttgacgacacggcccacgcaaagcgggtgtttgagagcgaggccggaaagaaaatgatggagcccttaaaacggatgaaccttacgggaatcggttatatggaactgggcttccgcaatttctccaacagcaagcgtcccatacagactgaggaggacttaaagggcctgaaaatccgcggctataatccgctgcagattaaggcgtgggagtcggtgggagtcaacaccaccagcgtcagctggaacgaactgtttacgtccctgcagcagagactgattgacggccaggaatgcgccaccaccagcttctatactgaaaaattctacgaggcacagaagtactggtctttgaccagacatgtgttcacgaatttcctgtggtatgccaatgaggatttcatgaactccctgtcggattccgaccgcgcctttatcatggagtgcgctcaggaggccattgattataactgggaactggcggaccagagcgaggaggagatacttaagcagcttgaggacgcaggctttcctgtcaatgatgtggatatctctgtcaggagacagctgggcgagaaaatcaacgcgtccattaagggcgatattatcgccaactgcggagaggatacgtataacatgctgatggctgccgtggcggctgagcggcaggagcagggggaggagtaaaatgaaaaaaacattgagatggctggatgtaaattttgaggcaatcctcatggtactctttttctccctgatgatattgctggtgactgtgcaggtagtgctgcgttttatctttaaaacaggattttcctggggcgaggaagtggccaggctgctgtttgtatggatgtccttttccagctttggttatctgaccaggggaagccgccatgtgcgggtgggctttttcagggagctgttcccggtccgcacccagaaggccattctgattttatgtgatgtcctctttctcgtattttccgctggcgggctgagggcaatggtacagctttgttccgacgcgtggcgttttcaggatatgctgacagctgttccgtggaactacaacgccctctatctggccggaatgctgggcttctttatgatggtggttcgcaacgtccagatcctggtgtggaagttcaggcactggggagatgatctggaacggtttgtgaactacgacggcgattattatgagaacaaccggatctgctttgaacccaaggtaaaggatgtgctggaactggcggaaaaagaggcggcggaactgttggagaagggggaataaaggcttatggttgcaatcttattgttcgtatcattgattctgtttctgctgctttccatcccgattggcgtcagcctggggctggcctccctgaccaccatccggaccatggactgtatcagcatgaccacctttgtacagtccatgatacagggactgaattcttttccgctgatggcggtgccactgtttacctttgcgggggaggttatgggaaagggcggtatttccaggcgccttatagacctggcaagggtattcaccggacggtttacaggcggactgggtattgtgaccattgtcacatccctgttctttgccgctatcgcgggcacaggctctgcggccgtggcagccatcggacttatcatgattccggccatggtgaagaatggctatgacaaggggtattccagcgcattggtggcaacagccggaaccgtgggcgtaatcataccgccaagcgtctgtatggtggtctatgccgtagcggcaggcgcctccatcagcggcctgttcatggccggaatcatgccgggacttctcattggggctggcctgattctgtactctgtattctattcaagaaggcatgggtataaaggggaagataagcggtatactccgggagagatatggcagattatactgaaggccattcctggtctgatgattcctgttattatcctgggcggtatctacggcggcgtattcacacccaccgaggcggcggccatagcaggcgtgtacggtgtgattgtgggactctttatatacagggagatcaaaccgtcggacctgatttatattatgtaccgttccgtgctgatgtgcgcgccggtactgctcatcataggcatatccaccggcttcggacgcatcctgaccattacccaggtaccggtcatgattgcggacgccattctgggacttaccagcagcaagattctggtgctgcttctcatcaatgtactgctcttgattgtgggcaccttcatggagaccaatgcggccatcattatcctgacgcccatcctgcttcccattgtgaccaggctgggagtgaatcccatccatttcggaatcatcgtggtaatgaacctgtccatcggctttatcacaccgcctctgggggccaacctgtttatggcctgtcaggtgggagagatatcctttgataagctggcgcggaagatatggccatggatcgtggtcatggtggcgcttctgatgctggtgacatacataccacagatatccatggcgctgcctgaggcgatgggagtgatataacagtaactgaaccggatatgatatggcggctttgatttaccaaagccgccatttttgcgttgttttaatccgcgctcattaatttaacagaataaggccacatcttatgcagatgcatgcaggctatccaacacggagcagtgaggcggaacgctgcttaaacagcggcgtgtcatgcggtgcccctggtctttaaggtgcaggggaaaagcgtcaggttggtggattccgagggctgcttctctgacagcagcagatccagtacccggtcaatcatgctgtccatgggctggacaaaggaggtgatgctgtaggcactgtaggaagccagctctatatcgtcaaagcctatgactgccgcgtcctccggcaccctcagcccgtattcggagcgggcgcagtccaggactccggcgcagaccagatcgctgacgcagaacagggccttggggcaggtgccttcctgctccagaagccttctgaagccttccctgcctccctcgtaggtaaacggggtgttgatgacagggcagtcatggattccccgctcctccagacgggacacaaagcctctgcggcggtcatggctggtggaagcctcgtcgtggcctcctataaaggcaaagctgcggtagcccttcatgaaaaagtagtccgcgcagtcgcgcccggcctgtacgttgtcgcagcagacagcctggattccaggggtattcatatagcggttaaacaaaaccacaggaaccccgaagtccacgcaggtatccgccagatcggatgtcagggtcacggatgtgatcaggatgccgtccaccctgtactgcaggatttggtggatcaggtccttcatatggccttcatcgtccagataaaaaaacaggatctgtttgcccatagagcggagccggatagaaagcttgcttaagaccgttgcgtagaacggattggtggtgttctgcatgatgactgccacaatattagtgctgttggatataagactcctggcaatcgcgtcaggggcgtattttaaggcgctggctgcgtccagaacccgctggcgcgtagatggattcatcttcgaggcgggattgaaggcccttgatacagtggcctgggatacgccggccagctttgccacgtcgatggaggtattgtggccgcgcccgtttgcgcgcttaccggtattctggatgctgtcgccggaatcagagattttcataagaaaaatcctccttggtgtgctgaataagtgcggtagccgcactgaatatagttaacattaccataaattatagttatttgcaaggaaacaaaggggaaaaacaaagggaaaatgaggatgaatacgaatttaacaggtcatctgaaagaaagcgttataatggagaatatcaaacgataattgtaagaagtgtacaataaatacggctatagtttgagtaaaataactaaaatacttaaaaagctaaaaaatacattgacgaacaggcagcattgggaatataatgagtttacaaacaaatgaatacgtattcaacaagaagcaaacaaaggttgcatattccataaaattgcagtagattcagttctgtaagttaaaaaaatggaagatgcagcttaaataaagaattaaaatgaataggtatacattttgctcagaacatataaaaaacaagtaatcaggaggaaaaacagtgggcaatacagtattgatgcgcggtgaaaccgtgactgcgtttacgcaggaattattccagaaggccggaatgagcgaaccagatgcgaagtatcatgcagaatgtcttgtaaataccaattattggggaattgattcccatggcgtgattcgggttccggcttattttaagagaatgttaaatggggccattaacaccaaccctcagatcaaggtggtgcggggcgagggatgccttgaggtcctggacgtggacgcggcagccggattcattggcggcagggcaggtatggagcgcgccatggaccacgctgctgtaagtggcatagcggcctgcggcgtcatcaacagcaaccactttggagcaggcgccctctacgcccgcatggcggctgagcggggcatgattggaattgccatgaccaatgtaaaacctctgattgtggctccaggagccagtgttccggtgacaggaaacaatcccattgccttcggcattcctacatacggcgaattcccatttgtgctggatatgtctctttccgtggtggcaggcggcaagcttaccctggcaatcaagaagaaggaaaagattcctatggactgggcaactgataagaacggccgtcccaccgatgatccccaggcagcctttgacggatatctgctgcccatgggcggacacaagggattgggcttatcctatgtggtggacatattatccggcctgataacaggaggcgttttctcgaaggatatgaagagcatgtacgccaatcccaaggagccaagcctgaccggccatttctttatcgccatggatatctccaagattatatcaaaggaacagatgaaggagcgcatggcgcagtttaaggaccagctgaaggcaacgcccatgtggcaggaaggggctcagatgcttctgccgggcgagattgagtaccgtaaggaacaggagagacgtcagaacggtcttcccattccggtgaccacctacgaggaactggcagagcttaagaaggaatatgacatccaggctccgctgaccataatccaagagtaatttatctgaacacataatataaggagaggatacaatatgaaactggaaaataaagttgccattatcaccggcggtacaaagggaatcggatacggaatcgcggaagagtatctgaaggaaggcgcaaaaatcaccatttgttccagaaacgcccaagaaggcgtgaaggcggcaaaagagctgggaaagctgggagaggtgctgtacctgcaggccgacgtttcatccatcaaggataaccagatgctggtggatgagacagtgaagaagtacggaaggctggatatatttgtagccaacgcgggaatcaatgatcctgacaagacccactacctgcatatcacggaagaacagtatgacaggattctgggcgtcaacctgaagggactgttctttggaggccagctggcggcaaggcagatggtaaagcaggggcagggcggagccattgtcaatatttcttctgtgaacgcttacctggccttggacagccagatgtgctataccaccagcaagggcggagtcagccagctgaccaaggtacaggctgtggctctcactccctatgacatcaaggtaaatgccatctgtccgggtcccattgagagtgagcttatgagacgtgttggatcggatgaacagctgtttaacacggtgatttccaggacgcccataggcagaatcggaactcctaacgaatgtggaaggctggccgtgttcctggcctgcgatgattccaattttgtgtacggacagtctatatacattgacggcggcagaagcttccaggcattcccggtaccgggttacaagacggttacggatgaacagtatgagaagcttatggagctggatcaaaagtagaggaggaataaaaggtgaagaaaatggggttgccgaaagtcggcatgattacctttagcgatgcaagagaacatgagtacaaggtgctttatgaggaaaagacagcagccaggataaaacggaccgttgaatactttgctgactatgagatggagctgcatacctttgataccgtggcacgttctccccaggatattgaccgtcagacagatgagcttaagaaaaagggcgtggaggtgtttatcgccaatatcccctgctggacctggcccaacggagtggtccggggcgtgctgaatatgggccttcccaccatactgctctccaacgacgatcccggaacccatggcaccgtaggattcctgggctcaggaggagcgttaaaccagataggctacaagcatcttcggatacagcaggattttacggatgagcacccgaatctgtttgacaccaagatgatgccttacatacgtgccgctgccgctgtgagaaagctgcagggcaggatattcggatttatcggaggccgttccctgggcattgacacgggaagttttgatcccatgcagtggaagaaactgtttcagattgacagcgaccacattgaccatgaagaaatcgtccgcagggctgaggcgattgatgagagcagggtggaggccgtattcaggtggctggtggattctgtgggctctgtgaagtatgacgaaaagctgaccgaagagcggttaaaataccaggtggcctgttatctggcaaccaaggatattatcgctgaccgccatctggatttcggcgccatcaaatgtatgccggacatgacgaatttcagggcgccccagtgcatttccacggcactgctcaacggcggatacgatgcggacggggagttcgacccattccctatttcctgtgaggctgatgcggacggagccctgaccatggagatgttaaaacttatctccgggggaatgcccaccatgttcgcggatgtgagccatgtgggatacaaggaaaagcttatataccttccaaactgcggttccatgtgcacctactatgcgggccggtgctgcgacggatgcaggaacatgaagaacatcgagctgcgcagggcaaacaggccttccggaggtgctgttacctttaccgtgccgagcgcgggcgagatgaccatggcaaggctttgcagggtggatggaaagtatcagatgtttattattgagacagagtttgtggacccgtccaaggagattctggatgcctttgtgaaagcaaggggcgtgcatcagcttccggttgcatttatgaaagcggattttgatattgagaaatttgtggacagattcaactccaaccacatcagcggcgtggcgggccattataaaaaggaacttatcaatctgtgcagtctgctggacattgagccggttgtgatacagtagaatgtgaggcggtgtaagtgggactttcctatgagagttttgatgaacggtttttcgatgtggtggatgtgaaacaggaccttgtgacggtctgttccggctttaccttcatcgaaggccctatatggaacgatgttacaggatgcctgacctttaacgatatcccggagagcaggacctaccgtctggaacagggcaaaacggtaaggcttttgcgggaagatacacataaggccaatggaaatgcctatgacatggatgacaacatcattgtctgcgagcatgtgcgaagctgcatatccaggaccaatgaccagggggaaaacctggaagtactggtaagccattatggggataaggagcttaacagtcccaacgatgtggtggtcagaagcgacggggttatcttctttacggaccccaggtttggaaggaatccgtcccgggtggggcttgagaggccccaggaactggatttccagggtgtgttctcctttgacccggggacaggggagcttaagctgctggcagatgattttgaaaatcccaacggcctgtgcttttccccggatgaagccttcctctatgtcaatgactcgccgaaaaagcacatccgtaagttcagggtggaagcggacggcaccttaagcggcggggctgtatgggcagagacaacgggagagggcgcgggactgcctgacggaatgaagacggacagccgggaaaacgtgtattgctgcgcccagggcggaattcatatttttaataaaaatgcggactatctgggaatcatcaaggttcctgagcagaccggcaactgcgcctttgggggaccggacatggatattctttatctggcagcctccaccacgctctacagcttccggattaaaggccgcgcagataaaaacgggaggaagatattaaatggtcagggaaaataaagtaaaacagaaactgaaaaacggcgaagccgtaatcggaacctttgtaaagacagtggatcccagtgtgattgaaattctgggatgcagcgggatggagttctttgttatagacagtgaacacgtctcctataacccggaaactatcacggatttggtaagggcctcggacttgacgggaatcgtgcccattgtccgggtcagggaagccacggcggtgaacattatgcaggccctggatacaggagccctgggttatcatgcgccgaacgtggatacacaggagcaggccaggattgcggtggacgcgggaagatatacgcctcttggaaacaggggatttgcgcccacccacagggctgccaattacggcatgatggataaacaggagtatattgacaaggccaacaaggagattctgaccatcatccactgtgagacaatggaatccctgggtaatctggacgagattcttaagttagaggagctggatgtggtatttatcgggcccatggacttgtcccagtccctgggaagggatgtgatgggccagaggaaccacccaaggcttctggaagccattgaccaaatcatcgaaaaggtaaacaaggcgggcaaggcagtgggcactgtggcggacaacgcgcagatggcaaaggaactgatggaaaagggagtgcgctacatccctatcagctccgatcagggcatgattggaaatatggcgaaaaacattgtaaaagagtttaaccagtattcaaaataatattaaaataaaaggagatatattaaaatgaaaaagcagacagaattcaaattagacaagagagattccgtatggttccaggacaatacggcagctgtaaactgtgcttatgcaaaggaagtgtgtgacattgcgattcttccaatcggagccatcgagcagcacggacctcactgcccatgcggcagcgattcctttaacgccatgggtattgctgaggcggttgccagaaagtccggcgccatgattctcgcctgcccgatgtacggctcccatccggctcaccactggggcatgcccggaaccatcccgctgacctttgagacccatgtgggccttttgaccgatatcgtccgcggcgctgccaacgcaggctttaacaagttcctgattatctccgcccacggccagaccatgtccatgtttgaggcggttcataagttgggcatcgagggatactttaccatcggcagcacctggtatgatttcctgagagacaacaagaaaacactggatacatttatgtggcatgcagatgaggcggagacctctgtggctctgtccctgtatcccgacaaggtacatatggacctggctgtacctggcaaggcccacggcctcatcgactccaagtggaagatcgcgccaggccaggcagcaggcgaaggcatgctgtaccacttcgagggaaccttctccctgatggagaaggatgacctggatacaggtgtaattggggatcccaccaatgcaagcaaggaaaagggcgacaaaatcgtggagagatgcgcggatctgtactgcgaactgcttgaagaggtaaagacaaagtatccatgcggcgtgaatcctctgggcttccgcaatcctctgggttataacggcaccaacaatatccagtatgatgcaatgcacgacgaacacggcaacctgaagaaataacagtcaggcaaaaaagcctgccggcaggtaaacagaccggcaagtaaacaggccggcagacgaaccatagatcaaaaacagacaggcggggtggatatgagagaaatcaccagattaccggcagaagagctggagcagaaggctgaacgggatgaggcgcggattgaccggatcctcagggaggcagtgatgaggagcggcaggaagattgtggtgctggatgatgatcccaccggtgtccagaccgttcatgatgtctccgtgtatacggactggtcagaggaatccgtgctgcagggctttcaggaggaagggaacctgttctatattcttaccaactccagaggctttacagaggacgagacaaaaaaggcccaccgccagatctccggaaacatagtaaaggctgccagggcaactggccgggatttcctcatcatgagccgcggtgattccaccctcagggggcattacccactggagacgcaggtgcttcgggatgtactcagccgggaaggacagcaggaaacggacggcgaagtcatctgcccctttttcaaagaggggggacgctttaccatcggaaacatccactatgtcagatacggccgggaattggtgcctgcgggggagacggaatttgccgccgacaggacctttggatatcgttcttccaatctggctgattatgtggaggagaagacgaaaggcgcctatccggccggtgaagtcatctgcatcggcctggacgacctaagacacggcagagtggataaggtggcaggacagctgatggaggtcaggaactttaataaggtgattgtgaacgctgtggactacggcgacttaaaggtctttgccctggctctctatgaggccatggagcagggaaaacggttcctgttccggacagcagcctccctggtaaaggtgatgggaggcatcacggaccagccccttcttaccagggagaagatggcactgccggagaacggacacggtggcgtcatcgtggtggggtcgcatacggccaagaccaccagacagcttatggagcttaaaaaggttcccggaatacggttcctggaattcaattccgacctggtgttaaatgacgccgcgttcagggaagagacagaacggaccctggagctgattagccggaccataacagagggtaagacagctgcggtctacaccagaaggaagctgctggaatttaaggatgacaccagggaagccgcccttatgcgttccgtgaagatatcggaggcagtgcagtccctggtggggaacctgaaggtggtacctgccttcgtggtggcaaaaggaggcatcacttcatctgatgtgggcacaaaggcgctccgggtgaagcgggccacggtaatgggacagatatgtcccggcgtaccggtgtggcagaccgggaaggagagccgctttccccatattccctatgtgatatttccgggaaatgtgggggaggacgccaccctcagggaggcagtagagatattgctgggtcgataagcgaataagatatacagagtataatggaaaatgggctgtaccgcattgtctgtgactgcggtgccggccctttttcgtctgcctggcgttcacaccggatgcaggactcttgacttcccgggaaatctggtctactattaaatggaatttcagattagacttgagattaggagagactggctcatgaataagaaagaagcaaatgaaatcaagaaattgtttacaccggcgggctgcgccatcacccgtatctgcggctgctatgtggacgcggagaaaaataaaaagacggagcttaaggaggcattcctctctctccaggaggaagaggcctttaaatattttaccatattcagaaacgccctttccgggaccatcggaaagaatctgattaatatggagtttcccttacatacggaggcagaggacggtacccagcattttcttttaaagctcagggacagccagttaaaggatgacgcgatactggaggagttctacgacaaggtcattgcggcatatgactacggcgagaattattatatcatcctcatccactgtgcctacgatattccggccaaggcaacggacggtacggagatgtttgacgcatcggactatgtatacgaattcatacagtgtaccatctgtcctgtcaagctttccaaggccggattgtgttacaacagccttacaaataccattgaaaaccgcgacagggactggctggtggaagcgcccgtccagggatttctgttccctgcctttaacgacaggaatacggatatccacagccttttgtactatgccaagaacccggaagagctgccggataccctgatcgacgagctgttaggctgtgtgattcccatgtctgccaagagccagaaggagacgtttcaggccattgtggaggagacgctgggtgagaactgcgattttgagacagtaaaaaacatccatgagaacctgagcgagctggtggaggagacaaaggacgagcctgtccccctgaccctggacaagtatcaggtgaagaagctgttagagacaaacggagccacccctgagaagctggaggagtttgaacagaggtatgcgcaagtggaggacggccccggcaccagctttgtggcagccaatgtggtcaacaccaggagctttgaaatcaagaccccggacgtgagcatcaaggtttcgccggataaaacatatctggtggagaaccggatgattgagggacggccctgtattgtcatagccatcaatgaacatgtggagattaacggaatcacagtacgccccgtggctgcgccgaaaggggatgaggatgaaaatgggcaggtgcctttttaagtgagcataacaatataacctgaaaacagacagaagggtgtttcaaagtataccaaaaaatccagacagaggccggagaaggccgctatctggatttttgtatatgaaagattcctgcctgcacagttctgctcctgggccagggcgctatcacggcatgatttcctgccgatacagtgtccgaaccgatgtttcagccatcagatgcgctctgcattatcacgcatgaatttgaattccgccacggagcggtcaaaggtctggatgtggtagtacagccagtccctgactttctcggagaccttttccacgaatgcgtctgtggggccttcttcctctgtcagcatctcatgaagctcctggacagtccttctcagctcctcatgcttttccttgtgctctttgatgcctggataatttatggattcctggagggcttcctcttcattaaaatgatactcggtataatccgccagaaagtttaacatcctggctgctccgctctggttggagcgctcctcacagctctttaataaatcattgatcttgcaaatcagctccttgtgctgggtatcaatcatctcattgcctgttaccaggtcgtctgtaaattctgcgtacatagtccaatacctcctgaatgtttgatatatataataaatgtcctatatatataatttagcacatataatgagaaaatactatgacttttgcaacaagaagaacagattactgaattcgtggaagaattcatcaggattgaaacctgttcagctatatcttcgactctccgaatacacttaatgtaggggtggttatacgtgtaagaagttgtctggacaaaaaagtcaatagttaatataatgaccatgtacgcgtggcaatcataagataatgggaggatgaagatacagatgagtcggacaattagtgcaggttatgtatatcgtcaatattctaccgaaggtgtttatattgcggattataaaagctccagggctgcccatgaggcaacaggggtttccattggttccatcgcaagagctgctcatggtgaacgcaggaccggaggcggttatgtctggagaaaagtactggcagattcgccaaaggaaagtattgagatagatttgattagtaaaatcggcaaccatgataaacgtcctctggtccagaaaaatctggatggagaaatcgttggggaattcctttccattgcccatgccagccggagtcttaaaatcagccggagaagcctttcatgtgcgctcagcggtgcccagaaaacagcaggaggctacatatgggaagagaagatggaagatgatatgcaggttcaggagcagtaaggcttctgcattataatagttatagaagaaacaggattaaaaacagtccgtgcattggggactgtttttttgttttggcagacagtatggcagtatgttcggaaagtctgtaaataaaagaaaaaaacgcagatatttgattatatttgcaagatatttatggaaatttgcatgagtttatagtacaataatgaataagaggagttgtatccctaagacagaggaggacgctgtatgaaacgtgacgatttggtttggagtgaccggaaaaggaactggctggggctgccatggacattcactgtatatggcctgacagaggaccggctgttcattaagacagggattcttaacatacatgaagatgaggtgcgcctgtaccggatactggatctgtccctgaggaaaaccctgtggcagaggataatgggattgggcaccatccatgtggacagcagcgataagaccatgaaggcctttgacatcagcaatataagaaattgtgaggatgtgaaggagcagctgtcccggctggtggagcaggagagggataataagagggtatcatccagggagttcatcggaggatacggggacgatgaggaccatgggtttgatgaggaggacagtctttattagaatgtaatccatgttattttattataagaaaggggactttgtatggggaaaaaacgcaatatcatagtgggacagtcaggggggcctacctcggtcattaattccagcctggcaggggtctataagacggcgaaggagagaggattccacaaagtatacggtatgctccacggcattgagggtctgttggatgagatgtatgtggatctgtccacgcaaatccattcggacatggatattgagctcctaaagaggacgccgtctgcattcctgggatcctgccggtataagctgccggatattcatgagaacccggcattttatgaaaaaatatttgccatactggataagctggatattgaggtctttatctatatcggaggcaatgattccatggataccatcaagaagctgtctgattatgccattgtcaagggacatggccagaagttcctgggtgttcccaaaaccattgacaatgacctggcccttacggaccatacgcctggtttcggaagcgcggcaaagtacatagccacctccaccaaggaagtgatccgggatgccatgggcttatcctaccgccgcaagaccattaccattatggagtgcatgggaaggaacgcgggctggctcaccggctccacggccctggccaggacagaggactgctgcggaccggatttgatttatcttccggagatcccctttgacattgataaattccttaaaaaatgtaaggatctgattcagaagaagccgtccattgtcattgctgtgtccgagggaatcaaggtgacggacggacggtatgtatgccagctgtcaggaggcagcgattacgtggacgccttcggacacaagcagctggccgggacagcggattacctggcaggtttcctggcaggtgagctggggtgcaagaccaggtccgtggaactgtccaccctgcagaggagcgcttcccatgtggcttcaagggtggatatcaacgaggcgttcatggtaggaggcgcggctgtcaaggcggcggacgagggggatacaggcaagatggtggtcattgaccgggtttccgacgacccctatatgagcgcggccggcatatatgacgtacacaagattgccaataatgagaagacagttcccagaagctgggtcaacaaggatggaagttatgtgacccaggaatttgtcaattatgtggagcctttaatccagggagactaccagccgtttatggtaaacggccttccccagcaccttgttcttaagcggtagaaggcagagggggcttatattttctatgaaacagttaaaaatcacataaaaaatacctgctgcaacggaaaagaatcagggcggttcccagaaaaatggggaactgcccttaagttttgataaagtaaaagagtccaaaaggcaaataatggaataattgcacaacgaaaacttgtattttttcaagtacaagacatgaaaagaaatttgacaattgaatataatagtgatatatatatttcaaccactttcaattggtatctgttggacggttccttcctgtaacctgacaggacagggatgtcacaaaaaaggagttttgactatgaaagaaaagaaaatcatgttaccgacaatggctgaggcaaagaggttcgttgatgaagctacgaagtgtgactttgatattgatgtattctataatcgtgtaaccattgatgcaaagtccattctcggagtgctgagtctggacctgacccggattctgacggttcagtttaacggtgagaaccagggatttgaggagtatctggaaactatttccccggaagccaatgcaagcgctgcctgataggggcgcggattaagaggcggattgcgaacacctgtttgcaatccgcctctttttatggtatgatatcctatattatatatggagtggacaggggaggaagaaagagttggggaatcattcgcagccccagatacgcatttcggtgcggaacctggtggagtttgtaatgagaagcggggatctggacaaccggaggacagctggggccaagaaggaggccatgcaggccggcagcagactgcaccggaagattcagaaacgtatgggaacctcctaccgttccgaggtgatgctgcggcatcaggtacaggaggacatgtttgatatcctggtggagggaagagcggacggaatcatcaccgagcctgccggagtcaccattgatgagattaagtgcatctatatggatgtatccaggctggaagaaccggatccggtccatctggcccaggctctgtgctatggctggttttacagcacccagaatgagctggaaaccatcggcatccagattacctactgtaacatagagacagaagaaatccgccggtttaaggaggccaggagctttgaggagctgaaggcatggtttgaggggctgattcatgagtatgtcaaatgggccagatatctgtaccaccatgggatccgccgccaggagtgcttaaaggaactgccttttccttatccctacagggaagggcagaaggagctggccgggagtgtgtaccgctccattgccagaaaacgcaatctgttcatccaggcgcctaccggggtgggaaagaccctgtccaccatctaccccagtctgaaggccatgggcgagggccacggagagaagctgttttacctgactgccaagaccattaccaggagcgtggcggaggaagccttttccattttaaggcgggaggggaatctctattttaatacggttaccatcacagcaaaggaaaagctctgcgtcatggaaaagccggactgcaatccccaggcatgtcccagggccaagggccactacgaccgggtcaatgacgctgtctacgaaatcatccaggaggtggacggcatcaccagggacaaggtgctggagtatgccgaaagatttgagatatgtccctttgaattctgtctggatatcagcaactgggtggacggcatcatatgcgattacaattatgtctttgatcccaatgtaaagctgaagcggtattttgaccagggggagccgggccaggggtacctgtttctggtggatgaggcccataatctggtgcccagggccagggagatgtacagcgccagccttataaaggaggatgtgcttctgacaaaacgcattttaaagacacagcccggagcggcaaaggtcattgcccagctggataagtgcaaccagcggttcctggaattaaagcgttcctacggcggggatgagggagagcgcaggaccgtgctggggagcacctacgagctgctgccggatgtgaatgttctggccctgaacctgatgactatgttcggggagctggaaacctttatgaatgaaaacatagaatttcccgaccgggacctggtgctggagttctactttgcagtccgggattttctgtatgtgtatgacaggctggacgagagctacaggatatatgaccagattctcgcggacggcagttttatggtaaagctgctgtgcattaacccggccgtgaacctgaaggagtgcctggacaagggcgtcagcaccctgtttttctcggccaccctgctacccatccagtactataaggaacttttaagcggcagccaggaggaatacgctgtctatgcaaagtctccttttccagaggaaaaccgcatggtgctggctgctagtgatgtcagcagccgttacagccgcagggggccttccgagtatgagaagattgtggactatatatgccgggtggtggagggaaaaaaaggaaattatatggtattctgtccttcctaccagtatctccatgccatagaggatattctggctgccagggaggcgtcgggagccctttcttttatctggaacgcccagacaaaccatatgactgaggaggacagagagacatttctgcatagctttgaggaggagcgggattgctccatggcagccttatgcgtcatgggagggatattttcggagggaatcgacctaaaagaagagcgccttatcggcgctgtgatcattggaaccggtctgccccaggtgaacacggagcaggagattctaaaggaatattttgatgaacatggggaacacggctttgactacgcataccagtatccgggtatgaacaaggtgatgcaggcagccggccgggtcataaggactgtccatgacaggggaatcatcgccctgttagacgaccggttcctccgcccggagtacgtggccctgttcccaagggaatgggggacctacaccgtggtcaaccggtacaacgtggatcaggctgtgagggcgttttgggacggggcggtatagccggccttggcggtatccctggggaccatggcagacggctgtttcctataacatatccatgaactgtctggctgcctgggatacgggaagactttcgttgtaggccaccatcatctggcgggaggggagctgttccttcaaatccaggatgaacaggtcctcgtcatttttggggatacagaagtcagggacaaaggcaattcccaggccaatgcgggccaggtcgatgagcaggtcgttgctggacaattcgatttccggcaccaggtccagctggcttttctggaatacctgatgaaggaattcgctggtggtgctcttgcggtccagcatcataatgggataccgcagcagctcctccagggccagtttagatcccttcaggggaaatgcgctgcggctggccacgaacacatcatggaattcattgataaccctggtattcatgctgccggccagggcggaattaggatagtttgcaatgatgaagtcggcctgcccgttttccaggaaccttgcacattcaatggaggtctggttaatgaccttgatatggatgtttggaaattccttgtggaagcggttcagataggggaccaggtagtagcggcatatggtgtcgctggctccgatacgcagctgtccgccgtttagggtatgggcttccagcagctggttctctcccttttttatgagattcatggcaggttcaatatgttttaacagaatctccccttccggggtgagctgtactttttttgtgcttcggatgaacaggggctggttaagctttttctccaggactttaatggactggcttacggcagactgggagataaagagctgcttggaagcctcggaaaagctcagcgtcaccgctacatggtaaaataccttataaagttcatagttaatatccattattaagtcctccttataaactaagcatatcttatcacgattgccgggactttgtaaagagggaaacttgacttatggtctgccatggattatcctattaaggattataaaaggaacatgaaattctggagagttgaaaggatagaagcatgatggaacacgatttttttgatatgtatttggaagagatgagaagcattacaccgcttgaaagggatgaaatggtttctgtccttgagggaacagccaggggcgacgcaggggcccgcagccgcctggtggagggctgcctgggggaagtgctggagatggtgagggaatacggggacagcgagcttcccttatcagatttggtccaggaggccaatacagccctgatgctggccgccatagagtacgatggcagcgaaccctggaatgaacttatgacacgccgggtaaaggaaagcgtggagctggccctggaggagcagaggacggagaaccagattgaggagaccatggctgccagggtcaatgtgcttcagaccgtgtcccaggtgctgtcaaaggagcttggcagggaggcgaccctggaggagctttccgctaaaatgaagatgagtgaggatgaggtcagggacatcatgaagctggccctggatgcgctgaccgtcaatggagaaggccaggcggcggcttccggccaggatgaggaagaaagcccaaatcctgtgagaaacggctggaatttggaggaaggcctgtaggacgcaggacggcaggaggtaaaaacagatgaaactctatatcatacgccatggacagaccgactggaatgtacagggaaggatacagggaaggcaggatatcccgttaaacgcagccggccgcagccaggctcagatgctggcaaagggaatggagaaacggcctgtgacagccatttactccagcccccagctgcgggccatggagactgcaatggcccttgccgggaaccagggggtggaggtcatacccctgccggagctggtggagattggatacggagactgggagggaaggactgcttcggatatattgacaaaggaacgaaagctgtatgaagaatggtggcagcatccggccacggtggcgcctcccggcggagagacactgaaccaggtggatgccaggtgcaaaaaagcctgggagcggataaagggggagataaaaggggacacggctgtggtggcccacgggggaacgctggcccattttattgtccatcttctggagggccagccggatgcagctgaaattgttgtgggaaatgccagcatcaccaccatagagtatgacccggttaccggacagtgcagtctggaagggttaaatgactgcagccatttattgtgaaaacattgacataatttttaggggaacaatgttcaaaacacttgcgttccatgggggaatatattaaaatgagagcagttttgtaagcgcttacaatttaaaaggaggtatttctatgacagaggtaagaggtaatgtaatcgtagggcagtccggcggccccaccgcggtgattaattccagcctggccggcgtgtttaagacagccaaggacaggggagccaggaaggtatacggcatgcttcatggcatacagggacttctgcaggagcggtatgtggatctggaggagcacatcaagtctgatctggatattgagcttttgaagagaacgccctccgcgtatctgggttcctgccgtttcaagctgccggagatatgtgacgaccgggagatatatgataagatattctccatcctggacaagctggaggtggaatacttcttctatatcggcggcaatgattccatggacaccatcaagaagctttctgactattccctgttaaacggcagtaagattcgcttcatgggcgtgcccaagaccattgacaatgacctggcagccacggaccataccccgggatacggaagcgcggccaagtatatcggcgctattacaaaagaggttatccgggacggccttgtatatgaccagcagaacgtgaccatcctggagatcatgggccggaacgcgggctggctcacaggggctgctgccctggcaaagggagaggactgcgaggggccggacatgctgttccttcccgaggtaacctttgacgtggattcctttatgaagaaggtggaggagctccataagaagaaagcatcggtggtggtggctgtatccgagggcgtgaagctggcagacggccggtatgtgtgcgagctgacagacggcattgagtttgtggacgcgttcggacataagcagcttaccggcacagcccggttcctggcagaaaaagtcaaccgggaagtgggatgcaagacaagggccattgagttcaattcccttcagcgctgcgcctcccatatcgtgtcaagggtggatattacggaagccttccaggtaggcggtgctgccgtgaaggaggcatttgagggcgagaccggcaagatggttattctcaagagggtgtccgacgatccttacgtctgtgtaacggatatatacgatgtacataaggtggccaacgtggagaaaaaggttcccagagagtggattaatgaggcgggggattatgtgaccgaggaatttgtgaactatatccgtccattgattcaggcggagctgacgcccattatgacggatggcctgccacggcatttgtattatacggatgtggagagaaagtagggattagaagtctgagctgagggggaatggggagttggccgccgggagccggcaaaacagccagtaaaacaaaatagcaaaacagccagtaaaacaaacaacaatacggcatagccgaaatggactataccgtatattgaggcgaatgctttctaaaatcagaaagcattcgcttaattaattttttgatgaaattgctaaaaataaaacctgtgtttgtcctggaccggcagacgggctgatagggggcggctgccggcagcgggatcatcagtggtatagcttcttatgctcatataccggctcggaagtgagctgcacgcccagtttgttgaataccttgatgtccacatcggacagcatcacagaggtgtggacctggcagccgcggagcttgggaagctgggccagagcttttttggcggtttggtcggtggccgcgctcatgctcagggcgatgagtacctcgtcggtgtgtaggcgggggttcttgcttcccatgtattgggtctttagggtctggatgggctcaatagcggacggagcaataaggtgtatattgtgggggatgtctcccaggaccttaatggcgtttaacaggagggcggcagaggctcccaacaggctgctggtcttgcctgtgacaatggtgccgtcatttaattccatggctgccgccgggccgccggataccttggcccgctccagacagggtgcaatcaccccgcgcatggtggagtcaatttttgccttattcattaaaaggttgattttataaacttcgtcggaagtcccttcctccttggccagacggttgagggcatggtagtagcggcggatgatttcctgcttggatgcttcgcagcaggcttcgtcgtccataatgcagaagccggccatgttcacacccatgtctgtgggagatttgtaggggctttctccgtatataccttcaaagatggcgtttaatacagggaaaatgtccacatcccggttgtagttcaccgtggttacgccgtaggcttccaggtggtaggggtctatcatattcacatcgtttaaatcagcggtggctgcctcataggccaggttcaccggatgctttaaaggaagattccagatggggaaggtctcaaatttggcgtagccggccttgatgccgcgtttgttttcatggtacagctgggagagacaggtggccatcttgccgctgcccggacccggagccgtgatgattaccagggggcgggtggtctcaatgtaatcgttcttgccgtagccttcgtcgctgacaatgaggggcacattgctgggatagccttcgatacagtaatggcggtatactttgatgtcacggtgctccagcttggttttgaactggtcggcgccgctctggccgctgtactgggtgatgacaacgcttcccacatagaggcccttgtcccggaactcctgaatcagacggagtacatcctcgtcgtaagtgatgcccaggtcatggcggaccttgttcttttcgatgtcagccgcattgatggcaatgaggatttcggcctggtcagccatttgaagaagcatacggagcttgctgtccggtgcaaagccgggcaggaccctggaggcgtggtagtcgtcaaaaagctttcctccgaattccagatacagcttgtctccgaattccccaatacgctgtttgatgtgttctgactgcatggttaggtatttttcattatcaaatccgattttcatttcttctgtaatctcccggttttttataatcacatacttttttagtatagcacaactttcaggccttcgctacaaggagttttgagggggatttttgaatatttataagcactgcatatatcaatgattaaatatattaattttacttatttattatttttgtgttatgataggaacagataaaagggcaaaggtcctttttgtgttgtgtattaatgaaaaggtcatgatgagagcaggaggttgctaaatgagcgtaagacgaatatttgtggagaagaagccagcttatgcagtaaaggcaggggagcttcgtgaagaactggaaaattatctgggcatccataatgtgaaaaatgtgcgggttttaatccgctatgatattgagaatctgtcagaggagacctataagaaggcgctggtgactattttctcagagccgccggtggatctggtttacgaggaggaatttaccaggaatccgggagacctggtgttttccgtggaatatctgccgggacagtttgaccagagggcggattcggcagagcagtgcgtaaagcttctgaaggaggatgaggagccggttatccggtccgccaccacctatgtggttacggcgcccctgaccgcagaacaggaggaggcgatcaagagcttctgcatcaatcccgtggacagccgtcaggcggatgaggagaagccggaaaccctggtgacggaattcgaggttccggaggacatactgtattttgatggatttgcggattcttcagaggaggagctgaaggctctttacggtaccctgaacctggccatgacctttaaggacttccttcatatccagaattattataagaaggaagagcacagggatccgtctgtgacggagatccgtgtgctggatacttattggtcggatcactgccgccatactaccttttccacagagcttaaaaatgtaagctttacggacggcgattacagagagcccatggaggaaacctataagcagtacctggctgaccgggaagtgatttataagggaagggacgataagtacgtgtgccttatggacctggctcttatggctatgaagaagctgaggagcgagggaaagcttcaggacatggaagtttctgatgaaatcaatgcatgcagcatcgtggttccggtggagattgacggtgtaacagaagagtggctggtgaattttaagaatgagacacacaaccatcccacagagattgagcctttcggcggcgctgccacctgtctgggaggagcgatccgcgatccgctgtcagggcgtacctacgtgtaccaggctatgcgcgttaccggcgcagccgaccccaccaggccccttggggagactcttaagggcaagctgccccagagaaagattgttaacagcgcagcccagggatattcctcctacggcaaccagattggtctggcaaccggttatgtgaaggagatctatcatcccggctatgttgcaaaaagaatggaaatcggagctgttatgggcgctgctcccagaaaggatgttatccgcgagacctctgatccgggggatatcatcattcttttgggcgggcgtacgggccgcgacggaatcggcggcgccaccggttcctccaaggttcacaccacttcctccatcgaggtatgcggggctgaggtacagaagggaaatgcgcccacagagcgcaagattcagaggatgttccgcaggcctgaggtcagcagaatcatcaagaagtgcaatgacttcggcgcaggcggcgtatcggtagccatcggagagctggctgccggccttaagattgatttggacaaggttcccaagaaatatgcgggcctggacggcacggagatagccatttccgagtcccaggagcgtatggcagtggtggtggatccaaaggatgttaaccggttccttgggtatgctgcagaggaaaacctggaggcagtgaccgtggcagtggtgacagaggagccaaggcttaagatggactggcgcggaaagaccattgtggacctgagcagggccttcttggacaccaacggggcacatcaggaggcggacgtgaccctggaggttccaggccgggcaggcaacctgtttgataaggcagatgtggctgacgtcagggaaaaatggctgggcatgctttccgatctgaacgtgtgctcccagaaggggctggtggagcgttttgacggttccatcggtgcaggttccgtgttcatgccttacggcggcaggtatcagctgaccgagacccaggctatggtggctaagcttcctgtgctgaagggacatacagatactgttaccatgatgagttacggctttgacccaaggctttccagctggagtccataccacggcgcggtgtatgcagtggtttcctccgttgcaaagatcgtggcggccggcggcgattacagcaggattcgtttcaccttccaggagtatttccgcaggatgaacgagaacccatccaggtggagccagcccttctccgcacttctgggcgcctacagcgcacagctgggctttggcctgccctccatcggaggaaaggacagcatgtcaggcacatttgacacggaggacggtgaaatcaatgttccgcccaccctggtttcctttgccgtggatgtgaacagccataagaatgtgattacccctgaattcaagcgtccgggcagtaagattgttgtgttccggattgcaaggaatcaatatgacctgccggactacagccaggttatggacggttatggaaagatatttgaagatataaaggcaggccgcattatatccgcctatgctgtggagggcaatggccttgcagaggcagtgagcaaaatggcattcggcaataagctgggtgtgaagattgagcacaatgtggacccaagggatttctttgccgctgcatggggcgatatcgtgtgcgaggtgccggatggaatggtgggacagctgtccatatcctataccgtcatcggtgaggtgaccgacagaggggcatttgagtacggaaacgtgaccatttccatggaagaggcattagacgcgtggatgactcccctggaggacgtgttccccactgccgcaggcagggaggcaagaggagaggaggctgcgctggaagagaagctgtatcacagcggcgcagtatatgtgtgcgaccataaaatcggacagccaaccgtatttattccggtattcccgggaaccaactgcgagtatgacagcgccagggcctttgagcgggcgggagcaaaggtggttaccagagtgctgcgcaacatgagcgccgaagatatccgccagtctgtggacgaatacaggagagagattgcaaaggcccagatcgtcatgttcccgggcggattctcagcaggcgatgagccggagggttctgccaagttctttgccactgtgttccgcaatgcagtgatgaaggaagaaattgaaaagcttctgggcgagagagacggactgatgctgggcatctgcaacggcttccaggccctgattaagctgggcctcctgccggagggtgaaatcaaggagcagggaccggagtcacctacccttgccatgaataccattggccgccatgtctccaagatggtatataccaaggtggtatccgataaatccccatggctggccggggccggactgggcagcgtatactgcaatccggcatcccacggagagggccgtttcgttgccaatgaatcatggcttcacaggctctttgccaatggacaggtggcaacccagtatgtggacgaccagggcagatgcaccatggacgagtactggaatcccaatggctcttatatggccattgagggcatcaccagccccgatggaaggattctgggcaaaatggcccattccgagcgccgtggcgaggcagttgccatgaatatttacggggagcaggatatgaagatatttgagtctggggtgaggtattttgggttgtagatggttacgcggacgtgtataggcagtcgcgtccgtgataggagggaacgcagtacggcaggtgactgtttccgcagtgggagagactaaggcccaaagtcacctcccgcccactgcttttcagaacgtccgctgtcctttccacgccagggatagaaaaaatctctggctattgatgtcagagattcggagtgtactgtctggctgtgattgacaattgcacagatgatccagcaaaaagggccgcatttcaagatgaaatcaagataatgcggccttgtatattgattggtatgccggtagattcggcatgccatttttctttttttctgaataggatataaatgatgcagatgcgaagatacgttgtgggtgagcgggatgggggcgggggaggcggaggcatctacaggagcgttggtatcacttgggctgcgggaaacggctttaagattcaggcgcacccttgtctgagcctgggaaatggattccaggctgaacctatagcgcgagttgggtcgcctgaatcttgtttaaagccgttttccgcggccttagtgattcccgctccgcagccggcctccgcctcccccgcccccatcccgttcacggacggattccccctcccccctctgcatcccttaaattctcttctgatacccaaccctcaaatcccctgcttcgcttccttctgtgagaatcagggtgccgcagcggatgtagccgcttttggccagggcgcgctgcatggcctgattgtcaggatgggtgtcaatgcggatattgcggatgcctgattggaggacatactgttctgcctctgaaaacagccgggcagccaggccccggcctttcatggagtccttcacacatacccggtggaatgcatagtatggctcctggttcagccaggccccgtctatggaggcatagctggcttccggcccggggacaatggtaatcatcccgaccacctggcccatgtcctcaagaacatggagctgggactgaagaatggaagcctccatcacctggcggttgggctcccccttctgccattgatcgatattccttgctttaaatgattccttggcctggtccgacatggctacaagctggtccaggtcttctgtgtctgcaaaacgatatgtcataaaagtcctcctgttataaggtgaagcgttctaaaatttgctgccggcgcattgatacagtcgtatccagtataccgttgccggtcctctgcgtcaataaaagcaggggaatgaagcttacttttcctgtggttgttccggggcaggatggtattgcattttgccggacggctgattataattgtgatatcataagatttcgcacagaggaaaggagcttaagtaagatgaacacagcattgacaagggagagggccttagaggccctgaaaaaatataacagggagccattccacattctccacgcccttaccgtggaaggcgtgatgcgctggtttgcccaggaccagggatatggggaggagacggatttctggggaatcgccggcctgctgcacgacattgactttgagatgtacccggagcagcactgcgttaaggcgccggagcttctgaaggaagcaggggcggaggatgagctcatccatgccgtgtgcagccatgggtacggtcttgtctcagatgtgaagccggagcaccagatggaaaagattttgtttgcgtcggacgagctaacgggcctgattggggctgcggccaggatgcgtccgtccgggagtgtaatggacatggaggtgtccagccttaagaagaagtttaaggacaagcgctttgcagcaggatgttccagggatgtaatcagggaaggggccgagggactgggctggaccctggaggagcttatggataagactatccaggccatgcgctcctgtgaggccgctgtcagcgaggagatgaaatcatacgaggcataacgcctttttcaccggccgttgctttgcgatgcctgcacctgtccgtttatcattccgaaccctttctttgatttgtaaagaaaatttctatatatattgaaaaaagacatgcagagatatatacttgaggggaaatgttgtgtgaattttctggaataaggggtaagtgcctgactataggcacttatctgcttatgagaaggagggaatgtaatggttgctatgtattttgtaggagcaggttcgcttatggcgctggcgtttgcagcctgcatgtttgtgcgggtcaggagagaacctggagggaacccggagatgctccgtatatccggagccgtacaaaagggcgccaatgcgtatctgagacgtcaatacaaaggtgtgggaatattctttgcagccgtgtttgtcatcctgctagtgatggcattctgcggctttttgagtttttttacgccctttgcattcctgacaggcggttttttctcgggtctgtccggatttatcggcatgcggacagccaccatggccaactgccggactgcccagggagcgtcccggaacctgaacaagggactgagggtggcattctcggcaggctctgttatggggtttaccgtggtgggcttgggccttctggatttgactgtgtggtatttcatattgaacatggcttttggcgcgcttcctgaaagccagaggattgcccagattacggccaacatgctgacctttggcatgggcgcttccagcatggccctgtttgccagggtgggcggcggcatctttaccaaggcggctgatgtgggcgccgacctggtgggtaaggtggaggccggaatccctgaggatgacccgagaaatccggctgttatcgctgacaatgtgggtgataatgtgggcgatgtggctggtatgggcgctgatctgtacgagtcctatgtggggtccatcgtatccactgccgcgctggccgtggccgccggatacggggtaaagggcgtggctgttcccatgatgctggctgccctgggagtgctggcgtctatcctgggaaccttctttgtaaagacagaggaggacgcgtcacagaagaatcttttaaaggctctgaggacgggaacttacatcagcgcggcgctggtggtggcagcggcctatgcagccatccgtattctgcttccggaccacatgggtaactacgcggccatactatcggggctggccgccggtgtgctgattggagctgtcacggaatactatacatctgatacgtataatcccaccagaaagctggcagcgtccagccggacaggaggggccacagtcatcatcagcggtctttccctgggcatgctgtccacggtggctcctgtggttatcgtgggcgtatcggtcctgattagctattactgctcaggcggcagtgctgatttcaatgcagggctttacggcgtgggcgtgtccgcagtgggcatgctgtccaccctgggcattaccctggcaaccgatgcttacggaccggttgccgataatgcgggcggtattgcagagatgacgcacatgccggaggaggtgcgtcagagaaccgatgcactggattccctgggcaacaccacggctgccacaggcaagggatttgccattggttccgccgcgcttacggccctggccctgatagcgtcctatattgataaggtgaagcagattgacccgtccctgagcatggacctgtccatcaccaatcccacggtgctcattggcctttttatcggaggcatgctgccgttcctgtttgcggcccttaccatggaggcggtgggcgaggcggcccagtccatagtggtggaggtgcgcaggcagttcagggaaataaagggactgatggagggaaaggcagagccggactacggggcctgcgtggatatgtgtaccatttcggcccagaggctgatggttgccccggccatggtggcggtcatcatacctgtggcggtggggcttcttctggggccggagggtgtatccggactgctggcaggcaatacggttacggggtttgtgctggctgttatgatggcaaatgccggaggagcctgggataacgcaaaaaaatacatagagagcgggcagctgggaggaaagggcagtgaggaacacaaggcggctgtcataggcgataccgtgggagatccgtttaaggatacctcgggtccgtccatcaacatcctcataaagctgaccagtatggtatccattgtgtttgccgggcttattgtggcagtgcatctactgtaaaaccgtgagacggcgcatggacattccataaggaaaagtccgccatagaaaaacaaatgtctcctgtacgcaaattttttcctttaaaagtattgacatacataacaaagtaaggtattatttgcacttgtaacgctatacatataaagtggcatttattttatgaaatacgctccatatccggcgcatagaaagaaacaagggagacagacaagatgaaaaaagtggtgaagttcggcggaagttcattggccagtgcaagacagttcaagaaagtagcagatatcattaaatctgataagtccagaagatacgtggtcccttccgcaccaggcaagcgaagcgacaaggatgagaaggtgacggacctgctctatgcctgttacgacgcagtggcagaaggaaggtcctataagaaaatcctggaaaagattaagagcagatatatggatatcatcgacggcctggatttaaacctgaacctggaccacgaatttgacaggatagaggagaattttctggcaaaggcaggacgggattacgctgcttcccgcggggaatacctaaacggcatcgtggcagccaacttcctgggatttgagtttgtggatgcggcggaggtcattttctttgatgaaaacggaaattttgagtcagagcacaccaaccgggagctgtccgagcgtctggagcatgtggagaaggctgttatccctggtttttacggttccaagccggatgggaccatcaaaacattttccagaggcggttccgatgttacgggctctatcgtggccaaggccatccacgcggatatgtacgagaactggacggatgtgtccggcgttctggtgacagaccccagaatcgtggaaaatccggaagttatcgagaccattacatacaaggaactgagggagctttcctacatgggagccagcgtccttcatgaggatgccattttcccggtgcgcaaggagggcattcccatcaatatcaggaacaccaaccgtcctgaggacaagggcacacttattgtggagagcacctgccgcaagccgcgttacaccatcaccggaattgccggtaagaagggattctgctccatcaacatagagaaggccatgatgaatgccgaggttgggtttgggagaaaggtgctcagcgtgtttgaacagtacggcatctcctttgagcacatgccctcaggcattgataccatgactgtctacgtgcaccagtcggaatttgaggagtttgagcagtccgtcatagccggaatccacagggctgtggagccggacaccgtggaactggagtcggacctggcgctgattgcagtggtgggacggggtatgcgctccaccagaggaacagccggccgcatcttttccgccctggcccatgcaagggtcaatgtgaagatgatcgaccagggatccagtgagtggaacatcatcatcggtgtggagaacgatgattttgagacggcaatcagggccatctatgatatattcgtaatcacggaactgtaggcagtctgcttatggcatagtacacaggaagcttcgcggggtatgattgatttccctgcggggctttttctgaggtgagccggagcatgccgcttctgccggggctgccccctgtcccggcttcccctgcccaatttttcattttattatagttgaaagtgtgatatactggataaaatagtaaacaggaagagaaggaggggtccaaatgcttgaaaagattgatttaagtaaaaaagttgacaagaagacttaccgcagggtcatggacgaggcggaagagaagctggggcttttgcagagggagtgtaaggatgcaggcattccggtcattctggtgtttgagggaatgggagccgccggcaagggagtgcagattaaccggctcatacaggccctggatcccaggggctttgacgtttatgcctgcgaccgccccacggaggacgagcagatgcggcccttcctgtggcgctattggacaaagacgcctgcaaagggcaggatcgctgtctttgaccgctcctggtaccgcagtgtccaggtggaccgttttgacggtcttacgcgggaggacaagcttggggatgcgtaccaggatattctgtcctttgaaaaacagctgtgtgatgacggtactgtcatcatgaagttttttctgtatatcgacaaggatgagcagaagaaacgttttaagaagctggaggggtccaaggagacctcctggcgggtgacggaggaggactggaacaggaataaggactttgaccggtatctgaagatgaatgaggagatgctggagaaaacagatacagactatgctccctgggtcatcatagaagcagtggacaaggattacgccgcccttaaaatcgtcagcacggtgatggaccgcctggagtatgagctggagcaccgcaggccggaagacgggaaacaggcgcttaggcaggaatccaagaccagggagcggtttaagaacggcgtgctgtccggaatcgacctctcaaagagccttacggaggaggagtataagacccggctgaaaaagcttcagaagcgtctggcagagcttcacagcgaactttaccgcctcaggattccggttgtcatcggttttgagggctgggatgccggaggcaagggtggagccatcaaacgtctgaccagcaacctggatcccaggggttacagggtgaatccgacggcagcccccaatgacattgagaaggtccaccactatctgtggcggttctggaacagtgtgccaaaggcaggccatatcgccatttttgaccgcacctggtatggaagggtcatggtggagcggattgaaggattctgttcggaggccgagtggagacgggcctaccaggaaatcaacgagatggaatcccatatggccaatgccggagcagtggttcttaaattctggctccacattgacaaggatgagcaggagcgcagattcagggagcgtcaggccaatcctgccaagcagtggaagattacggatgaggactggcgcaaccgtgagaaatgggaccagtatgaggaagcggtcaacgagatgctcatacgtacttccaccacctatgctccgtggattgtggtggagggaaatgacaaacgatatgccagggtaaaggtcctccagactgtggtggatgccctggaaaagaaagtaaaggaagtaaaaacagacaaatgagtgagacgaaccatgtaattgtaattggcgcaggggcggccggtatgctggccgccatagctgccgccagggaaggcgctgccgtggagctgtgggagcagaacgaaaagccgggcaaaaagctgtttatcacaggcaaaggccggtgcaatgtgaccaatgcctgcgatatggaggaactgctgggctccgtggtgagcaattccaaattcctgtacagcagtttttacggttttacaaaccaggacatgatggatttgctggaacaggcagggcttcgcctgaaggtggagcggggaaaccgggtatttccccagtctgacaagtcgtcagacgtcatcagcgccctgtccgcccttttaaggcagacaggagtcagggtgtgcctgaatcagaaggcggagggactggcggtggaggagggcgtgtgcaaaggggtacggtgcggcggcaggatacagacagccgaccgtgttatcgtagctaccggaggtctgtcctatcccgccaccggctccaccggggacggtcttaaatgggctgcggacagcggccacagacttacggagctttcaccggccctggttccctttgaggtgaaggagacagagacggtcaaggagctgcagggcctttcccttaaaaatatagaggcagctgtctatgacggaaaaaaggagctgtaccgggagtttggggaaatgctgttcacccatttcggggtcagcggccctgtgctcctaagcgccagctccttctgcgccaaggccataaggaagaggcctctgcgcctggtgattgacctgaagccggccttgtcatgggagcagctggacgagcgcatcctcagggatttttccgacagcaggaacaagcagtttaagaatgccctgaaccacctctatccgtcaaagctgattccggttatcattgaccgcagcagcgtggacccggataagaaggtgaatgagatcaccagggaggaacggcgcggactggcagaggcaaccaaggccctggagtttaccctgaccggcctcagaggctataaggaagctatcataacccagggcggcatatcggtaaaggacgtaaatccatccaccatggagtccaagaagattcagggcctgtattttgcaggggagatactggatttggacgcggtgaccggcggctttaaccttcagattgcctggtctacgggctgggcggccggaaaggctgcgtcgtcatagcgccgggaacagcggaggctgcccgcagggcggaatacatgagtaccatatagttacatgagtttaataaaatcatatgagtacaatcaattcacatgaaaacaggacaggagagaatgcaacacatggagtatttcaatattgccattgatggtccggccggcgccggcaaaagcaccatcgcaaagctggctgccaaaaggctggggtttgtatatgtggatacgggagccatgtaccgttccatggccctgtattttatcaggcagggtatatcgccggaggatgaggaggccatagccggggcctgcggccaggtggaggttaccatccgctatgcggacggagtccagcaggttattttaaacggagaggatgtatcgggactgatccggtcagaggaggtggggcgcatggcttccgccacctctgtgtacaggccggtcagggagaaactggtccagctccagaagcagctggccagggaggcagatgtaatcatggacggccgggatatcggcacctgcgtgctgccggacgcgccggctaagatttatctgactgcttccgtggaaatccgcgccagacgccggttcagggaactggaggaaaagggaacagcctgcgatatcagggagattgagaaggacatagaggagagggattaccgggacatgcaccgggagaactcgcctttaaggcaggcagaggacgctgtgctcctggattcctcccacatgaccatcgaacaggtggtggactccatcatacgcatagccagggagcgggggtatgagggataaccatggacaggaaagttacagttgcaaagagcgccggcttctgttttggcgtggaacgggcagtggaccaggtctatgaacagatagaagccgtgaagaacaaaaaggcatccggccccatctacacctacggtcccattatccacaatgaggaagtggtcagggatttgtcggataagggggtcatggtcctggagacagaggaggagctgagggcccttccaagaaaccagggaacggtcatcatccgctcccacggcgtcagcaggcatgtttatgagatattgaaggagaggaatgtggctgtggtggatgccacctgtccctttgtgaagaaaatccaccgcattgttgcggagcacagcgcggccggggaggcggtggtaatcatcggaagcccggaccatccggaggtggaaggaattaagggatgggggaatgaacatactacggttataatggatggggagggggcagataactaccgtcttcctgagggccgaaagttatgtatcgtgtcccaaacgacatttaattacaacaaatttaaagaattagttgaaaaatttttaaaaaagggttatgatagtagtgttttaaatacgatttgcaatgcaacacaggaaagacaagtggaggcagcaagaattgcttcgcaggtggacgctatgattgtgattggcggcaggcattcttccaacacccagaagctttacgagatatgcctcaaggagtgtaaagacaccttttacattcagacactcggcgatttagatcctgacagtgtatcttctgtgcgcagcgtaggtattacagctggggcatccaccccaagaaaaattattgaggaggttcataccagaatggcagagcagagttttgcagagttattaaaggaagaggaagaatcaaccaaaccaatacgtacaggagagatagtcaccggtcaggtcatcgaagtcagcaaagatgagataatactgagtattgcaggtaataagtccgagggagttatcacccgtgacgaatacagcaacgacagcaacgtggatttgaccacaaaagtacagattggtgaagagatggaggccaaggtcattaagcttaatgacggcgtaggcatggtttccttatcctataagcgtatggcagctgacagaggcaataagcgtctggaagaggcatttgagaaccaggaggttctgacagcaaaggtagcacaggtattagacggcggcttaagcgttgaggttgagggcgcaagggtatttatcccggccagccttgtatctgacagctatgagaaggacctgtccaagtatgcaggacaggatattgattttgttatcacagaattcaatcctaagagaagaagaatcattggcgacaggaaacagcttctggttgcacagaaggcgaagctgaaagaagaactgttcgcaagaatccagccaggcgataccgttgacggaaccgttaagaacgtaaccgacttcggcgcattcattgatttgggcggtgcagacggacttcttcatatttccgagatgagctggggccgtgttgagaatcctaagaaggtattcaaggcaggggaccaggtaagggtactgattaaggatatccagggagagaaaattgccctgagccttaagttcccggaggctaatccatgggtcaacgcagctgacaagtatgcggttggcaacgtggtatacggccgtgtggcacgtatgactgatttcggcgcgtttgttgagctggagccaggtgtggacgcactgcttcatgtttcccagatttccagggagcatgttgaaaagcctgctgatgttttaagaattggccaggagattgaggcaagagtggtagactttaacgaggctgaccacaagatcagcttaagcatcaaggctatgctggcacctgctgcacaggatgcggatgtggctgacgtggacattgatgccatgtcacagtacacagaagaataagatttgaattcatgaggactggttatgggctttggcccataaccggtttttttgcttaaatgctgtttgtctccagaacggcttgtgaggatgcatggttccgtgctatactggaacaaaaaagaaaagcgctggtctggcaggccggagcgtctatttcatggctgggttcagaagcagggatgcctcgaatattccgttgctgtaatcgaatttcagtatgccgtgataccgttccaccagataacgcacagaggtagtaccggtgcccatgtcctcccgtttggatgaaagaaaacgtccgtccttcatacgtatgagatgggaataggtgttctgtatggacagggcaatcatggattcgccggcctgtccgatgttgatggtgatggagggcgttccctgggtctgcctttggcatgcctccactgcattggagagaaggttgcccaggatagtgcagaagtctatctccggcacaggaaggctctgaggcaggcaaatggaggagtttactgcgataccctgggactgggctgtttgtatgtagtaattgagcagcgcgttggaggaaggattctgacagtactgggtggtgtccagggttgcataggtgcccagatagtcatttatgtattccagggcaaactctgtctccttctgctccaaaagccccttgagcgtgatgagatgatggcggtaatcgtggcgcgcttttttgaattgttccagattatactggagcgtggccatctgggatttctggacactggccagcagccgggtagtccgatactgctccttggccgcatagctttcagacagccgggacagaatcctcagactcacatagtggaccgtgtagatacaggcaaaccagcagacagcaaaaaaaatcatgtcaggatgatgctgaagcatacgtgcgggtgccagggaacgggatgccaggcggaacatgatgaaaaagagcaccgggatggcggccagatatttccagaccggaagaagccgtgtgtattccactgctttggtcagatatttgtgcaggatgtaataggccacccagaccatgagaaacagaaaaataagattgcttaataatttgtctcctgtgataagggaactgctcttattaagggaagcagaggcattggacaggtccgcgcagtatccggcggtatccgtgaagttcttaaaaaggaaaagggaatagatattcacaggccagtctgtgcgcaccatccatttacagacaagtatgttggtggtcatggtggtgcaggaccacgccagctccagccagggccgggacaggaaagggctgaagcatgtaaggcctaaaaagtatacaaaaaacaggtatcccataagaatacctgtagtttttgacatagagtaccgccattcccttcggaataccgccaaaaagggaacgataatgaatatgatttcggccaaaatcacacttatcagctgtatctgtgcaaagctcatccgatgcctccgtttaacttggagaactggtaatctgcatactgctggtgaatctgcgaccgcatggtcctggtaataggcagatgctctccggttgtcaaaatgaactctgatttctccatagaaaaaaccttgtccatattgatgatgcaattccggtagcagcatatgaactgggagtatataaggagcataccggaaaaatcttcaaaccgcatgtaagtgcggaccgtcttatctggaagatggatttgtatgtagtggtttgaataatcggtgtaaaggatagagtcaatgggaatcttctgcatgatgcggctttcctttacctctatataatgactctgcttcctgcgggatacagacaaaaaatactccatggtctggctgaacttatcgtagcggataggctttaccatgtaatccagagcacggacctcatatcccttcagggcaaaatcggtgctgctggtggtgaacacgatggtacaggaatcatcatccctgcggaccctttcagcgattctgataccggaggtctcattccggagaaaaatatctatgaatataaggtcaaagctgcctctttgccagcagcgaaggaagtcggcggcggtattgaagatggtcgtctgctggcaggtatgtgtgtcggagcaataggtggatataaagccggctaactgacgggcctcatctatcgagtcgtcgatgactgcaatgttcacggtgcccttcctttctttatgtatggttacagggtaacaaaaggtttataaattatcctgtaacggtacgttatgaaacaatccatataggttcagtataatatacaacaaattaaattgcaagggcaattggaataagttgtaagcgcggtataggcaggcccctgcctgggtataatccatttgtacttaatttgtatcagcaagaaaggagcaagaacctacatgggaaagtctaagaagaatgaggcatttgatcctcataatctgagtgcgcaggaccagcttaaatttgagattgcccaggaactggggttggacgcaaaggtcatggagggaggatggaggagcctgacagccaaggaaagcggcaagataggaggccttatcacaaagcgcaaacgggaacttaagaaagaggcattgcagcaggaataattttccgatatactgttttatatctgtaatcaggaataatacaaaggagacgggaatgaagataggtatgatttgttttacggcaagaggcactgcaatatgccgccttctgtgccgccggttcagggatacagggacagagtgcacaggatatgtgccgcagcgcttctggaagccggaatgggaggcggagggaatcaagcctcaggacaagtccctttcggaatggaccggatccatgtttggacagaagagggcgctggtgtttatcggggcggccggcattgcagtcagggccattgcgccctttatccgggataagatgacggaccccccggtggtggtggctgacgaagctgggcatttctgcattcccctgctgtcaggacatgtgggaggtgcaaatgagctggctgaaagaatggcgtgctggcttcagggaataccggtcataaccactgccacggatatcaatggcatctttgcggtggatgtctttgcggcccgaaggggcctttgtataacagacagaaaaaaggccaaagaaatttctgcctggctgctggatggcgggaaggtgggatttttctgcgattcggagtgccgcagggcggagggcgcgtctggagccggaaccacaaaaaacgggagttcaggcagaggagcagagaacgttggggatggtactgaaggcatatgcaggcataatatatgtatgaacagcgtgtgcaggcataacatatggatcacattccgaaacagtgaaaggccctccctttctccgaacagggaagcggtctttctccgcctggttccaaaggtggcagtggtaggggtgggatgcaggaagggaaccccgccggatatcctggaaggctgtgttctggaagcgctggaaagaggaggtattgacccggcggcggtaaaggcattatccaccatagacataaaggcaggggaagaggcggtaaccaggctggcccgcaggtacgggtgggagctgcgtacatttacatccagggagctgctggctgtggaaggagagtttcaggaatctgattttgtaagatccgcagtgggcgtgggcaatgtctgcgaaaggtcctgtacagccaggggaggaagacttttaatacataagcaggccggaaaaggggtgacggtggcggcagccatagagccggttgcagggaaattagacattgagaaatgcagttggatatgatatacttttccatagtttaaaagtcagatgttggacagcaggtgagactatgggagattcgtacatctataagaatcagaaaaaattgagatggggatacaccacaggtacttgtgcggcagcggcttccttggcagctgccgttatgttgttgcggggcaggagaatggagcaggtgtccctgacaacgccaaagggagtccggctggacctggaggtggaggaaatggagacgggggagaactgtgtctgctgcggtgtcagaaaggatgcaggtgacgacccggatgtgacggacgggcttatggtgtattcacaggtcaggctgccggatgcggacagcggcggcgccggagatgcgagagaggccggagatgcgagagaggccggagataacacagaggccggagatgacagaaatgcctgtggggattatgtgtatgagaaagacggattgcggctgattttatccggaggagtgggagtgggaagggtaacccagtgcggtttgagctgcgaagtgggaaaagctgccattaacccggtccccaggcagatgatatttgaacaggtggccggtgtgtgccgggaatctggttttaagggagtgctttccattgaaatccgtgtgccggaagccctgaaggtggcggataagacctttaacagccgtttgggaatccagggaggtatatccatactggggaccagcggaatggtggagcccatgagcgagacagcgctccttgataccatccggctggaactgagacagaggatccgaaaaggggagaagaaccttctggtgacaccgggaaattacggtgagagctttgtgggcactgtacttggccttggccttgggcaggccgtgaaatgcagcaatttcataggcagtaccattgacatggcggtggaagagggggctgagtccatgctgcttattggccatggaggaaagttaatcaagctggcagccggtattatgaatacccattcctcctgggcagacgggagaatggaaatcctggcagcccacggagctgcctgcggcgcaaaaagagagctggtggaacagattatggaagcagtgaccgtggacgaggggctgcgccttttagagacagaggacggcctgcgtgagcaggtgatgaagcgggtgatggcgcggctggagcagcatgtgaaacggcgggccggcggacgtctgagggcagaggttattgtatttaccaatgagcgcgggatacttggggcaaccaccggcgcagatgatatgttattgtactttacgaacagattaagaaatagatgaaaggcggagcaagatgatacatatagtaggagcaggtccgggggcggttgatttgattacggtccgcggacagaaacttttgtcagaggcagatgtggtcatctatgcgggttccctggtcagccgtgatcttctgggctgggccaggcaggatgcaaggatttatgacagtgcctccatggacctggagcaggttatggaagtgatggaacaggcggaacgggacggtcttacaacggtgcgtcttcataccggggatccctgcctctacggtgccatacgggaacagatggacggactggacgccagggggataaaatatgacatatgtcccggggtcagttctttctgcggagccgccgcagcccttggaatggaatataccctgcccggtataagccagagtgtggtaataaccagaatggccgggagaacaccggtgccggagcgtgaatccatagggaaatttgctgcccacggcagcaccatggtgatattcctgagcgcaggtatgacgggagagctgtcagatgaactgatgaagggcggatatccgggagatacgccagcagccattgtatataaggcaacctggccggatgagaagacggtccggtgtacggtagccaccttaaaggagacagcagacagggagggcatccataagaccgcccttattgtggtgggaaatacggtggcccagaccggctatgagcgctcaaagctttacgatcctgcctttacaaccggatttcgggccggccgggaagacgtcccggggaaaatggagccggggacactctatgtggtgggaatgggacccggagaaaaaaagcagatgacaggacaggcactggaagtgatgggccggtgccaggtcatagccggttatacggtttatgtggacctggtaaggggattgttcccccagaaggagtttctgaccactgccatgaccagggaagaggaacggtgccgtaaggcgtttgaatgctgcatggagagaaagaacacagctatgatttgcagcggggacgcgggggtatacggaatggcgggccttatactggagctggctcagcagtatcccggtgtcagagtcaggatagtgccgggaattacggctgcctgcgcaggggcagctgttctgggagcgccgctgatgcacgattttgctgtcatcagcttaagcgaccggcttacgcccctggaagatatatggaaccgggtagaggcagcagccaagtctgactttgtcatatgcctttacaatccggccagcaagggacggcccgactttttccgtcaggcgtgcaccaggattcttaagtacagaaaaggggataccgtgtgcgggctggctgtgaacattggcagggaaggggaagagacggaggtccttaccctggagaaactgaaggatcgccgggtggacatgtttaccacggtttatatcggcaattcccattccatgcagattggctcctatatggtaacgcccagaggttacaggtatgaaggaaaataagaaaagtgtcatactgtttgccgggaccacggaggggaggctgctggctgaatatcttcaggagcttgaccggccctttgtaatttgcgtggctaccggatacggaagggatttgctggaggatatatgcaggccggacaggaccggatgcatggagatacgccaggggcgcctggatgtcacggaaatggagcagatgtttgatgagctgcggccggaactggttattgacgccactcatccatatgcggcggaagtaacccacaacataaaaatggcctgttccagacgaaagggcctgcggcttttaaggtgcctgcgtgagccgggggccggggacagccggccgggagtcatccatatgcctgatgtggaggcggcagtcacatggctgtcctctgtgaagggaaatattctggtgaccacaggcagcaaggagctggctgcgtatacaaggataagggattatgggcagagaatttatgccaggatcctgccctcggcggaggccgtggcccagtgcaggagtctgggctttgagggccgccatattatcgccatgcagggaccgttttcagaggaaatgaatctggcacagctcagggaatatggatgtgcttatctggtgaccaaggatgggggcgcagccggaggatttccggaaaagataaaggcagcccacaaggccggggtagcggcagtggtgattgaccggccgggcagcggggtaggcatatccctggatgagataaagggactgctaaaggagtggatggaccatgaaaggaaaggaagcatatatggatgatttaaggccaattgtatatctggtgggcataggaatggggggcgaggaccagctgacgggccgggcaatggattgcctggaggcggcccaggtggtgatgggggcggaccggatgctggacagcgtcagcgcctataccgataagaagcgggtattttcagcctacaagcccagtgagatggtacagtggctgggcagcttccggtgggatgaggcagccctggtgctgtcaggagatacgggcttttacagcggggctgaggcggcggccaaggcatttttgcgggagggatgggatgtggaatttgttccgggtgtgtccagcctttcctatttctgcgccaggttgggaaagagctggcagaatgtccatccggtcagcagccatggaagggactgcgatgtggtggcctatatccgcagcttcaggagctgctttattctgctgggcggagccggcagcgtgccggatttgtgccgtcagctggtcagcagcggaatgagcggcgtgactttatgggcaggagaaaatttttcatacgaggacgaacgcattgcctgggagatgactcctgccgagcttctgatggaggatgagcgtcttccctttggcagcctggcctgtgttttggtggagaatacagaggcggcggaaggacagctttatcctcagtccggtccccgggatgaggactttatcaggggccaggtgcctatgacaaaaaaggaggtgcggaggatatcactggataagctgtgtatcggctctcaggccgtgtgttatgatatcggggccggcaccggctccgtggcggtggagatgggtatggagatacgcaggcggggcggcagcggccaggtgtatgccattgagcggaaccgggaagccctgcagctgattgaatccaactgccagaagttccatggaagctggatgggatttcacattgtggaaggcgaggcgcctgaggctatgaaggggctggagcctcccacccacgcattcatcggaggaagcggaggtcacatgcgtgaaatcgtggcagccctccttgacgccaatccccatgtgagaattgtggctaacgccattacactggagactgtgggtgagattctggcatgcatgaaggaattcggattcgccataggagagataacccaggtatgggcagctcctgtggatacggtgggaagctaccatatgccaaaagcgcagaacccggtgtatgtggcggttatgcaggacccaaaagacgatgagggagagatacaatggcaggagttatgatagcggctccgggaagcggcagcgggaagacaatggtaacctgcggcctgctgactcttcttaaaaggaagggatataatccggctgcgtttaagtgcggaccggattacattgacggcctgttccaccgcagggttctgggagtggaaaatggaaacctggacagcttttttgagaccggaacacatatgagacagaaactgtcccggagcatggaacaccattttgtggtggcggaaggggtcatgggatattttgacggcctggggggcgtgtctgttcaggggagctcctttgagattggaaggattctcggtctgccggctattctggtggtggatggaagaggagccagcgtatcgctgatggcattgattcagggatttttggagtatgatgccatgctggagggaaaaggcgaggaaaaaactcacgataaaactgactgtgatgcggaatgtgcggctggcatgcaatacgaagaatgcaggaagagaagatggaaagagaatgaggaaaattatcgcgagaaaaaatctcacacatccaatggactgcatgggtgtgtttgcggaaacacagactgccatgagagcaagggtaaaaaaaataacaacataaggggaatctttttcaaccgcatgccccccatgatatataaccgtataaaacctatggtggaggaattgtttcggattccggtcattggatatttacctgaactgaacttccttcatgtgggaagccgtcatctgggactggtgcttccggatgagatagatggaatcagggagcagctggaacagctggcggaccggatggatgaaaatttggagtgggaaccgctattgaagattgctgctgaggcaggcggacgggacagggaggtaccggtccgggaagaagcaggagccgggcagcaaacggggaatgtagcgggaattaagccgggaaacaagctgggaaacgagccgggaaacataccgcatttccgcctggggattgccagggatgaggcattctgtttttattatgaggacaacctgagggctatggaacaggctggggcccggcttgtgtattttagtctgctccatcaggagaaactgccggatgggctggacgggctgattttaggaggcggttatcctgaaaatcacggggaggccctggcggcgaacaggaccatgcgggattcggtggctgcggctgccgcgtccgggatgcccattctggcagagtgcgggggatacctctatctgctggacagtctggagggagccgacggaacggtttatcccatggcaggggtcttgaagggccacggatacagggccgggaaaaccggcaggtttggatacataaccctggggcccaaccgctgccttccctatctccgggaaggggaggagataaaaggccatgaatttcattactgggactgcgattgcggggaggatgaattttgtatgacggctgccaagccaaagggcggccgcagctggccctgtatgagaacagcaaaacaggtgatggcaggattcccccacctctattatccttcctgccccggactggtccgacggtttgccggacagtgcgtggaatacggacagagacatgaccggaaacatgacagacaagagcgtaacggacaagaacatgacggagaggaacatgagctatgacattgaaggaagcgatgaacagcattaagccagccagccaggcactcaggcagcaggcaaagcagcgctgggaccaggtggccaaacctctgggaagcctgggagtcctggaggaggatatcatacgcattgccgctgcttccggcagcctggcagtcagcctgcgtcccagggctattgtggtcatgtgtggggataatggcgttgtaaaggaaggggtgacccagacagggcaggaggttaccgccattgtggcggggaatatggcccggggaaattcgtgtgtatgcctcatggcccgccaggcaggggccgacgtgattcctgtggatgtgggtatggcctgccgcgacgcggttcccggcgtggtgaaccggaaagtggcatatgggacaaaggatttcctggaggaacctgccatgaccatggaggagacagtgagggccatggaggcaggtgcagatatggccatggaactgaaggaaaggggatatgtgctggctggctccggggaaatgggaatcggcaataccactaccagcagcgccctgctttccgtgcttcttaatatggacccggaactggtgacgggccggggggctggtctgaccactgccggctacaaccgcaaggtgcaggtcataagggaaggcatccgtatccgcaagccgtccggggaggacccggtggacgcgctgtccaaagtgggcggactggatttggcggccctgacgggcttttacattggatgcgcggcctgcggcctgccggtggtgctggacggactcataacaggggcagccgctctggcggccgtcagaatcagcccggatgtaaaaggatatctgctggcctcccacgtttcagccgagcctgccggggcaatggttctggatgctcttggccttaaacctgctatttctgcgggaatgtgtctgggggagggcaccggcgcagcggccctgtttccgcttttggatatggcggcggctgtgtacacgcagatgagcagctttgatgacatccatgtggatgcgtatgagcatcttctgtaactggaatgtaaggaatttggatgaacatgacgacacgataataggagacctggaatgattactctggtgacaggcggaagcggcagcggaaaatcagaatacgcggaagggcttattctggactccccctgttcccgccgtttttatgtggctaccatgattgcatatggaaaagagggacgggataaggtggagcgccaccgtgtgctccgaaagggaaagggattcatcaccatagaaaagccccggaatgtgggagaagtgatggttggagagtatgagaccggtttaagccccttatcccggaccggccgtgctcttttgctggagtgcgtatccaacctggcggccaatgagatgtttaaggaggggacagggaaaacggaagcaggagagcagcagggcggtccaatccaatgtctgtcccataagattgcggaggatatcatttccctggccggacaggttcaggatatggtgattgtcaccaatgaagtggatcgggatggaatttgttacgaacctgagacaatggagtatatccgtctcatgggctgcctgaatcagaagctggcatctgccgcggaccgggtggtggaggtggtttacggcattcccgtgctcttaaagccctccgccctgggaccggcagcaattggggctgactttaaaagaagggagtgtcagggagaatgaacggactttattcctgcatcatagcaatttccatgtattccaagatacctatgcccaacgtggagtggagtgaagaccgcatgcgctatgtcatgtgcttttttcctctggtggggattgtccagggagcggccctgggcctttggctccattttgccctggatgtgctgaatctgtccgtgggtgctgcggctcttacaggggcagccattcccctgctggtaaccggaggaattcacatggacggttttctggataccatggatgccattcattcctatggcgacagaagcagaaagctggaaattttaaaagacccccatctgggagcctttgcagtcatttccttcggcgtttatatgatgctttatctgggcgttttccatgaatacctgtcccttgtcctgagggaggacaggggggacagatattttctttatgcggttccctgtcttgtgtttgtgatggagcgggccttcagcggcctctccgtggtcacgtttccccaggccaagaagaagggactggcagccggatttggcggggcagccaggaaaaggacggattccctggtgctgcttctgtggatgcttatttgcctggcagcaggtgcggcagccgctaaggtgggatgccacggggcaggcatgctggcaggagtcctgcttatgacccacctggctgtgttcatatggtattacaggatgtccgtgaaacagtttggcggggtgacaggagatttagccggatgctttttgcaggtttgcgaactggccggcctggcagcggccgcagtccttttaaaagcgggcttgatgggaggaatgtaggaatgatcttggtgacaggaggaagcttccagggcaagagggtgtttgtcagacagtacctgggggaacagaatgcagatggaactgtctggacagagggagcagaggcctcctgggaggaatttatggacggcaggttctgccgtgatttccagctctttgtcaggcgggtaatggaggggagtgcaggcccttccttccgtgaacagaagggaccggccatggaccagattcttgaacagcttctggaggagctgctggccggacccaaggaccgtgttttggtgacagatgagataggttgcggcatcgtgcctgcagatgcctttgaacgcctgtaccgggaggagacagggcggctctgctgccggattgccggggaggcggatgaagtgtggcgggtgtgctgcgggacagggatacggattaaataacgaggaaggtagacatggacattacgtggctggatatatggaaatttcacggtgcggcattgttggcgggatgtgtgattgactggatcataggagaccccatatggcttccccatccggtgcgccttatgggaaccatgattgcagggacggaatcacggctcagaaaatggacagaggggacgggaaggaaagggcagtcccgggcaggggtcatcctcgctgtattcatgtgtatcatatggtggtgtgttccatgggcaatcgttcacggggcagagcatctatggctgtccggggcctgggcggttcttcttctggcagaggggttcctgtgcagtctcatgctggcagccaggggactgtatacagaaagcatgaaggtgtgccgcagcctggaggaaggcagcaccgaggaggccagatataatgtatccatgattgtgggaagggataccgcagcgctggatgagggcggaatcgccagggcagccgtggagaccgtggctgaaaatgcctctgacggtgtcattgccccctttttgttcatggcacttctggggccggcaggaggcacgctgtacaaggccgtcaacaccatggattccatggtgggatacaaaaatgacagatacatgtactttggccgctgtgcagccaggctggacgatctgcttaatctggcgccggccaggctgaccggaatccttatggttctgggggcatgggttctgccgggcatggacggggctcatgcctttaaggtgttccttcgggacaggaaacgccatgccagccctaattccgcccacggcgaggccgcctgtgcaggcgcccttcatcttcgcctggccggtgacgcctggtacttcggaactcttcataaaaagccgtatatcggggatgatgacaggcaaatccaaccggcggacataaggcgtgccaaccgtcttatgttttttgcggaggggatgatggtccttgggctggctgtgcttattatgattttgtgataccattctggttttgccaaaacagccggcgggggtagaaaaggatagctgtaaaaaagatagatggaggttattatggaatatcaacacggcggtgacatatacagccaggacatacagatggattattctgccaatatcaatcccctcggcatgccggaggcggtcaggcaggctctgagggactgcctggagagggaggtatgcagcctgtacccggacagccggtgtgaaaggctgagacaggtcctgggcaggcatcacggggtggaggataaatggattatctgcggcaacggggcagctgatttgatattcggactggcagctgcgctgcgccctgtacgcgggctggtgactgctcccgccttttccgagtatgagcaggcattgaggtcggtgggatgcaggaccgactattattatctcagggaggacagggggtttgctctggacgcggcagggatgtgcggctgtgtccgggcggcggcagagaggggcgagccctacgatgtggtgttcctctgcaatcccaacaatcccacggggatacccgttaaaaaggaagaggttaagcagctggcagatacttgtgagcggctgggggcttacctggcagtggatgaatgcttctgcgattttctggataattcagaattatattctgtcatacctgacctggcccggtttacgcatctgtttgtccttaaggcatttacaaagctgtatgccatggccgggctgcggctgggctacggcctttgcagcgacagcggccttctggagcggcttcaggcagtacgccagccctggtccgtgtccggcccggcccagtgcgccggcgtggcggcccttggagagacggattttgcggagcacaccagagcggtgcttaagggtgagcgggagaggctttctgccgccctccatgacctgggctttcaggtatatccatcccaggccaattatctgttctttcgggaccgggaagaggacggaatcctggaaaaaggccggctttaccaggagctgctgggccggcgcatcctgatccgcagctgtgccaattatccagggctggactcatccttttaccgtatctgtgttaagctgaggcaggacaatgaacagctcatccgggaaatggcccgggtgcttgagaggaggaaaccatgtcccaacatacaaagtcaatcatgattcagggaaccatgtccaatgcgggaaagagcatcctggcagccgggctgtgccgtatttttcaccaggacggctacaggacagcgccttttaaatcccagaacatggcccttaattcctacataactccggaagggctggagatgggacgggcccaggccgtacaggcggaggcggcgggaattgtccctaatgcggatatgaatcccattcttttaaaacccaccacaaatgtgggaagccaggttatcgtccatggaatttccaggggcaatatgaaggccagggattattttgcctgtaagaaatccctggtgccggatattatggcctcctaccggcggctggaggagcagtacgatgtcattgtcatagagggcgccggaagcccggccgagattaacctgaaaaccgatgatatcgtgaacatgggcatggcggacatggcggacgccccggtgcttctggtgggggacattgacaggggaggtgtctttgcacagctctacggtacggtggccctgctgacagaggaggagagaaagcgggtaaagggattaatcatcaacaaattcagaggcgacaggtccatactggctcccgggatttccatgctggaggatctgtgcggtataccggtggtgggggtgataccctatatggatgtggatatcgaggatgaggacagcctgagcagccgcctggagacaggaaaaggcaaagcacctgctgcggtggatttggctgtgatccgctttccgcgcatctctaattttacggattttaatgtgttttcaggaatccccggggtgtcgctgcgctatgtgacaagggcttgtgaccttggaacccccgacatggtcatccttcccggcaccaagaataccattcatgacctgctgtggatgcgccagaacggtctggaggcggcaatccttaagctggcggaccgtcaggtgccggtgtggggaatctgcggcggttaccagatgatgggagaggtgctggtggacaaaaaaggggtggagtcggacctcccttcacggacatccggaatgggccttcttccacttaaaacggagtttgaggaagaaaagataaggacccaggtggaaggcgcgttcggccagctggacggctgccttggcgggttgtccggaaaatccattgagggatatgaaatccacatgggccgcacgtacattgaccgggaagagggggctgcggatacagccagaatcgtttcctggcgcagggaaccggaaatatgccgccccatggactatgtgatggaaacgggaaaggacaggcttttatccagaaaggccagaatggacgggtggaacaggggaaatatctacggcacctatgtacacggaatctttgacagccccggaatcgccaggacagtggcagaggccctggccgctgcaaagggcctctgcctggaacaggcggcggatatggattaccgcacgtacagacagcagcagtatgacaagctcgcagaagagctcagggagaatctggacatggctgccgtgtacagaatcatgggcatcagccaaaaaggaaaaatgggcatcagccaaaaaggaaaaggagaggagaagccggatgacggatatacagttggaacaggtactgccgggagacattgagaggcgcagttttgagatcatacaggaggaactgtccttacgggggatttatctggagcctgaaaatgaaatggttatcaagagggccatccacaccacggcggattttgactatgcacaaaacctggtattttccggtcaggcagtgaaaagaggaacagaggccttaaaagcaggagctgtcattgtcacggataccaatatggggctgtccgggatcaataaaaaaaggctgtccgccctgggcggggaagccttctgttttatggcagatgaggatgtggccctgcaggcaaaggaacagggcaccaccagagctgtggccagcatggagaaggcggccaggctctacgggctgcaggggcgtccgctgatttttgccgtgggcaatgctcccacggccctggtccgcatatatgagcttatagaagaaggactggccgtccctgcccttgtcatcggagtgccggtgggattcgtgaatgtggtccagtccaaggaactgattctgaccctggaggatacgccgtatattgtggcaaggggaagaaaaggcggcagcaatgttgccgccgccatctgtaacgcgctgttataccagattccggtgcagggcgttgcagaaagtacttaatacacacgctccggtctatttccggccgctccagcagtaggtgcagagcttgcagggggagattccgatggactttaccaggtcatccagcctgtggtaacgcagggtggtgaatcccaggcgcttgcggatttcctcaatcatctccttgtaattggcgctgtccgggtccgtgtaagtgtttagcacatcccgggacacattgtcgccctctctgtcccgtatgatgcgtctggtaatcagatccagctctgaggtggaacgggagaagttgaggtaggggcatccgaacataagaggagggcaggccgggcgtatatgcacttcctttgcgccgctctggtacaggaattccgttgtctcacccagctgggtgccccgcacgatagagtcgtcgatgagcagcagctttttgccgcggatcagcgcgtccacaggaatcagcttcatgcgggcgatcaggtttctctggccctggttctggggcatgaaggagcgcggccatgtgggggtgtacttgatgaagggacgggcaaacggaatgccggattcattggcatacccgatggcgtgggcgatgcctgagtcgggaatgcccgcaaccacctcgggctgcgcgtcatccctctttgccagcagctttccgcactcgtagcgcatgctctccacattgattccctcgtaactggatgtagggtatccgtagtatacccacaggaaggagcatatcttcatttcttccctgggagggctgaccgtctccacgctttcaggcgtcatatatacgatctcaccgggccccagttctttgtagtccgtatatcccagattgatgtaagcaaagctttcaaaggaggcgcagtaggcatcatccttgtgcccgatgacaatgggggtccttccgaatttatctctggacgcatagattccttccggagtcagcagcaggatggacatggatccctctattttttcctgggcataaagaagcccttccaccaaggtggatttctggttgataagggcagccaccagctccgtagcattgatacgcccatggctcatttccatgaaatggatatggccgttttcgtaggctgatgccaccagctccgcctcgttgttgattttacccactgtggttatggcaaagctgcccagatgggactgtatcagaaggggctggggttcgttgtcggaaatacatccgattcccaatgttccttccagctcgtccaaatccccgtcaaacttcgtacggaagggggtattttctatattgtggatggacctcgtaaagccctggctgccgtatacggccattccgcctctcttagtccccagatgggagtggtaatccactccgaaaaataagtccagggtacagctgttttttgatgcaacaccaaatattccgcccatatgtcatacctcttttatctatgtgtttgttttatgttatcacagttgattgcggctctgtctgccggttacggacttatcataacatatattagtagtacaggacaatatgattgatatattatttatacttatgagaaactataagcatgcccggaggggccttccggtgaatattcacttgcgcgccgggatgacaattccatgcatttgaggtatacttgtgataaaacttgtgatgaattttctggagctttcagttatgatccggaaatgaggaggcttgcaaatgacagaaccagatggacagaatgagcggcagaggcagcaggccgtccgcctgaccgtggcaaaggacggcagtggtgactatgatacggtaggcgcggccctggaggccctgggagacaaagagggacctccggcctgcattttcataaaagagggcgtgtacagggaacggctggaaattagaaggccgggaatcacattggagggccagtcagccggcggcaccgtcattaccggtggactgtctgccggaatgaccatggaggacggcagtaagcgggggacctttcggacttacagcgtgctggtagacacccatgattttacagcaaagaacctgaccattgaaaacagcgccggtccgggcgaagcggtgggacaggcgctggccctgtatgcggacggggaccggattctgcttaagggatgcaggctgctgggaggccaggacacactctttacaggtccccttcctccgaaggagatacaaaagaacggattcatcggaccaaaacagttttcgcccagaataaacggacgccactgctaccaggactgctttatccgcggggacatagactttatatttggcagtgccacagcttattttgacaggtgtgagctgtactctgccggcagggatacagagaaaaaagggtacgtgaccgctgcgtccactcccaaaggacagaaatacgggtatgtgttccgaaactgccggtttacgggaaacagctcccgtgaaagcgtctacctgggcaggccctggagagattacgccaggacggtcctcattgactgctatctgggaccccacatatgccgtgagggatggcatgactgggataaaaagaatgcgcgttccaccctgttttacggggaatacggaagctatggaccgggggcggaggaacaggaggcagtggaacaggggaaaagggaccattgtacatccagaccggactgggtttttatgcttacccgtgaacagatacaggattacaccatggagcaggtattaggcggaacagacgggtggaatcccggggcatatatttaagttaagaaggaagggatatacttatggatttataccgtatcatactggtggacgacgaggaagaggtcaggcagagcatcatcaggaaaattgactggacgggagccggtttctgcgtggttggggatgcggaaaacggggaggaagccctggagaaagtggaggcactggagccggacctgatactgacggacatcaggatgccctttatggacggcctttccctggccgaacgggtgaggcagaaatatccttcagttaaaattgtgattttttcaggctatgatgattttgattatgccaagcaggctatcaagctgaatgtgacggagtacatcctgaagcctgtgaatgtggaggaactgacggccatcttaaaacgtatcaaatccaacctggacgatgaaattgagcagaaaaggaatgtgagtctgctgcgtgaaaattatatacgcagccttcctattctcagggaccagtttttaaacgagctggtggggagcactgtgcccggaaacgtacttaaggaaaaactggctgagtatgatatcccgctggcaggcgccaagaaatgggtggccgcggccattgacatagagccggaggagatccgggaggggaatatgctgcctctccacaaggagagggacctgattcctatttctgtcatgcaggttgtggaggaaaagctggggaactattgccgttcttccgtattcacttcctccaggacctcctggtctgagctggcccttattgctgccattgacgaggataacagccagacaggactgatagatgtgctgggggatatctgcaaggaaacaaagaagattctggaggtgcccatcactatcggcattggccacagctgccaggacctgggggagatcagcggctcctataaggcggctgtggacgcccttggctataaggccattgtgggagcgggaagcaccatttatatcaatgatgtggagcctgtaagcgggggaaagctcagctttgacagcaaggacgaagcagaacttattgcagccattaagttcggtcccagggagaagatagaggaagcagtacaggcagtcatggataaaatgagcgatgcaaaggtgcatttcaggcagtgccaggcatatatgctcagcgtgtccagctccatagtccagctgattcagcagtatgacctggacctggaacagctggcggaggagggggaggagcagggggatacctttgccgtcatcccaaggatgatgaaaaaggaggactttgcccactggcttctctcagccgccctcaggatgaaccaggccatgaaccgggagcgggataataccatgaagcaggtcatccagaaggccaaggaatatattatggacaattaccaggatccggatttgtctgtggagaaaatatgccgccagctgcacatgagcccggcctatttttccaccatgttcaagaaggagacaggacaggcatataccgcctacctgacccaggtccgcctggacaaggcggtggagcttcttaacaagaccgatgacaagacctatgtcatagcggccaaggtgggataccaggagcagaattatttcagctatgtgttcaagaaacgtttcggggtttcgcccaccaagttcagaggggcaaaatagatacaacaggtctgccgcgccgcttttggcgggaacagggcaggcagcgtaaaggagcaggggacatgttgtttgagaagcagaggattaagctgcagaaggccagtatacggtatatcatattcatctactttacactgacggccctggccgcaagtatattcataggcatttccctgtattccaggctgtcgggccagatgtccgccaccatccgggaggagaaccagatactgattaatcagatcaccaggtccatggaggattacctgcggaccgtgatgaagctgtctgattccctgtactacggtgtcgtcaagaacgcggacctggccagcggttccatcgggagcgagatgacccttctctatgacaataacaaggacaatgtggagaatatagcccttttgtccaaggagggaaagctgctggaagccgtgcctgcggcccgccttaagacaaatgtggatgtcaccggtgaaaactggttcacctccaccctggagaaaacggaaaatatgcatttttccacgcctcatgtccagtacatttttgacggcagcgagaaccagtaccggtgggtcatttccctgtcaagggcagtggagatcacccggggaccttccacggaccagggagtcctgctgattgacatacgctacagcagcctggagcagctctttgacggggtaaatctgggaaatggaggctatgtctatttaatcagcagcagcggggaaatcatataccacccccaggcccagcttattgactcaggaattgtacgggaaaacaacctggaggtatccggactcagggacggcaattaccggcagaccgtggatggggaggaacggaccgtcacggttaagactgtgggatatacaggctggaaggtggtgggggtgacaccccttgacggcgtgtccctcaacaatataaagacaaagctcctggtaattttcatgattgcctttgtcctttttatcatgaccattattaattcctatatctcatccaggataacagacccaatcaaggagctggagaaatctgtcaatgaaattgaggcaggtaatctggagacagaggtcaggagcggcggctcctacgagatacagcatctgggcaattccatacagaacatggcccggcagatacggcggcttatggacgatattgtggcggagcatgaatccaagcgaaagagcgagttcgacaccctccaggcgcagattaacccccatttcctgtataacactctggacatcatagtgtggatgattgaaaatgagaacctgactgacgcggtgcgcgtcgtgacggccctggccaggtttttccgcatcagcctcagcaggggaaagagcatcataactgtcagggatgagctggagcatgtgcgaaactaccttatgattcagcacatgcgctataaaaataagtttacttataccgtggaggcagaggatgaggtccttgacctggccagtctcaagcttgtcctccagccgctggtggaaaatgccatctatcacggcatggaatttatggacggggacggggaaatccgtatccgggcatggcggcaggataaggatttatttatgagtgtatcggacaacggcctggggatgacccgtgagcaggtgaaacggctgttcggggatacggatcacatgccgtcgggcaggggttccggtatcggagtgaagaatgtccaccaacgtatccgtctgtattttggcaatgactacgggctggaaatccagtcggagccggatgaagggacaacggtcacggcccatctgccggccatcccctatgaggaagtaaagaaagagggatcctatgttaaataaaggaaaaatactctggtgcgtatgggccggcatcctggtcctgctgtttttgatgtcctccacggatctgataatcaaggaaaaaaagattgaggtatatccgatctccgtcataatagaaggggacaacgacgactactatgtaaatttcaaaaagggtatggaccaggccgcagtggagttccatggggatgtcagctttatcaccctctatgcctctgatgaccaggaccagcagatggacctggtaaaacgggaaatcagggacgggaccagggcggtgattctggctccggtaaagcctgaggaggcggtaaggggactggaggatatgaacccgggctgccccgtcatccttctgggccagtctcctgatgagggcgggactctggataccatcggtgtggacggcaggaagattggaaggctgctgggcgaagcggcggcttcccaggcacccagggatgtaccggtctatctcttttgcaggggactggactatggggacagcgcccaggtctacgagggggtccggactgtgctggatgagcggggatatcattaccggcttattgagaggaaaaaccaggacacataccaccaggccatacaggaaacggactctcccggaggcggcaggatcaccattatagcactggatgtgcagtcgctggaccaggccacccggatactggaggaaaacaccatataccagggccgggtggcagggctctacggcgcaggaagcaccacctccctgctcagggctctggataagggaattgtcacaggaatgactgcatataaccagtttgacgagggatatttaagcgtgaagcaggcagtggaagctattcagggtacgcgccagaagcagcagaccatgctggaggccatctatgtggatgaggataagctgagggataagacatacgagaaaatgctctatcccattgagtaagtgagaggggccggaagtaagaggaaacaagataaggaaaggggcattgcggtgaaagggaagtggatgtatctattggcagcctgcatgggggcggctgtccttataggtgtgtggcagtacatgggaagggaagacgggcggaaggcggataagaactctgtccgcatcggggttctgctctaccggggggacgacaccttcatcggcactctgcgcaccggcctggaggacaaggcaaaggaatatgaacaggaaacagggatcaaggtaaagctggatatcatggacgccaaggggagtcagaatacccagaacagccaggtggagcgtctcatttccctgggctgcgatgccctgtgcatcaacagcgtggaccgttcgtcggcctccatcatcattgacaaggccatggacgcaggaactccggtggtattctttaaccgggaaccggtggaggaggatatgaaccgctgggaaaagctgtactacgtgggagcggacgccaaggaatccgctgtgcttcagggagacatcctggtggatgcctataatcaggatacacgaaccctggatgccaacggcaacggcctggtaagttatgtgcttttggaaggggagaccagccatcaggactccctgatacgcacggagtggtccatccagaccttaaaggacgggggcgttccactggagaagattacaggaggaattgccaactgggacaggagccaggcatcagccctgatggagcagtggctgaaggagtatccgggacagattgagctggtggtcagcaataatgacgacatggccctgggagccatcgacgctatgaaccgggccggaatcggggccaattccattaaggtggtgggtatcgacggcaccccggtgggcataaaggctctggaggaagggtatcttttcggcacagtggaatcagataaggaacgctactcccaggccatatttgacattgcctggagtctgtccctgggccaggacccgaaggacagggtgccgcagctggaggggaattattactggtgtcctcagcgggcgctgacccagactgaggcaaaattgcttaaaaaccagtgattcatatcagaaacaccgatgaaaagagataaaatcgaagaaattttataatcattctataaaaatcatatggaaaaatgcacaaccgggtcgtataataaacttgttgttaagcaaaaacaaccaaagtcaacaaaattataagggaggaattaaaaatgaagaaagcattaagtgttgctcttgcgtgttccatggcattatcactggttgcctgcggaggcggcagcaagccaacagaagcaccaaccacagcagctgccggggataccacaaccgaagcagcagcagacacaaccgcggcagacacagcagctgcaccggaagcaggcgcagaggtggcaaacaaggataagcctttagtatggtttaaccgtcagccctccagcagtgctacaggacagcttgatatgacggccctgaattttaataaggatacatattatgtaggtttcgacgcaaatcagggcgctgagcttcagggtaccatggttaaggactacatcgagaagaacatcgactcaattgaccgcaacggcgatggaatcatcggctacgttctggcaatcggagacatcggacataacgactctatcgcacgtacaagaggcatccgtaaggctctcggcaccgcagtagagaaagacggcaatgtaaacagcgatcctgttggtacaaacgcagacggtacagcaactgttgtacaggacggctccatcgaagttggcggaaagacatatgttgtccgcgagcttgcttcccaggagatgaagaactctgcaggcgctacatgggatgctgccacagctggtaatgcaatcggcacatggtcttcctctttcggcgatcagattgatattgttgcatccaataacgacggtatgggcatgtccatgttcaacgcatggtccaaggacaataaggttcctacatttggctatgacgcaaacagcgacgcagtagcagctatcgctgagggctacggcggcactatcagccagcatgcagacgtacaggcttacctgacactccgcgtactgcgcaacgcactggacggagttgatattgatacaggtatcggcacagcagacgatgcaggcaatgtcttaagtcctgatgtatatgtttacaaggcagatgagcgttcctactacgcactgaacgttgctgttactgctgaaaactatacagatttcacagattccacaatggtatacgcacctgtagccaatcagctggatgaggctacccatgctacaaagaatgtatggctgaacatctacaactcagctgataacttccttggatcaacctatcagcctctgctccagaaatacgataagcttctcaacctcaaggttgactatatcggcggcgacggacagacagagtccaatattacaaaccgtcttggaaatccaagccagtatgacgcatttgccatcaacatggttaagacagacaatgcagcttcatacacatctctgcttgagcagtaatattcattgaaataaagatgtactgttattagggagaagaaattctccctaatattaaatattgaaacctatcaatctacatatacaggagtaaaataatggcagataagaaagatgatatcgtcttatcaatacgcggtatgagcaagtccttcggccgaaacagagttctggaccatatcaacctggatgtgaagcgcggaaccgttatggggcttatgggtgagaacggagctggtaagtcaaccatgatgaagtgccttttcggcacctaccagaaagacgagggaaatatcttcctgaatggcaaggaagtaagcttttccggaccaaaggatgctcttgaaaacggcattgcaatggttcaccaggaattgaatcagtgtctggaacggaatgtaattgataatttattccttggacgttatccggtcaattccatgggtgtaattgatgaaggcaggatgaaaaaggaagccgccgagctctttagaaaattgggaatgactgttaacctcacccagcccatgggccgcatgtccgtatcacagaggcagatgtgtgaaatcgccaaggccatctcctacaattcaagggtgattgttctggatgagcccacatcctccctgaccgtgcaggaggttaacaagctcttcgagatgatgaggatgttaaaggagcagggaattgccctgatttatatttcccacaagatggatgagatttttgaaatctgcgacgagatatccgtgcttcgggacggcaacctggtcatgacaaagagcaccaaggatgcaaacatgaatgagctgattgcggcaatggtcggccgttcccttgataaccggttcccgcctgttgacaataccccaggtgatgtgattctgtccatccagaatctgtctacaaagtttgagcctcatttgcaggatgtttcatttgacgtaaaagaaggagagatattcggactgtacggtctggtaggggcagggcgcacggaacttctggaaacaatctttggtgtccgcaccagagccgcaggacgcgtttattttaataaccgccttatgaatttcagcagcgcgaaggaggccatggagcatggctttgccatgattaccgaggagcggaaggcaaatggcctgtttttaaaaggagaccttaccttcaataccaccatagccaatctgcagcagtatatgtcgggtatagcgctttccgatgcaaagatgataaaggctacgtcaaaggaaatcaaaatcatgcataccaagtgcatgggccccgatgatatgatttccagcctttccggcggcaatcagcagaaggtcattttcggaaagtggctggagcgcagtccgcaggtgtttatgatggacgaacccacaagaggaatcgacgtgggtgcaaagtatgaaatatatgagcttatcatcaatatggcgaagcaggggaagacaatcattgttgtttcttctgagatgccggagattctcggaattacaaaccgtattggtgttatgtcaaatggacgtctttctggaattgttaatacaaaagagacaaatcaggaagaacttttaaggctcagtgcaaaatacctataagggggattcatggatatggcgaaaggaaacaatgagactcttacggctgaacaggaaatgcagctgcgccagccaattgaggattatgttggcgaaattcagaagaaaatcgacagtctcagagcggacggcacaaacagagtagtcgctctgcaaaataatattgatgcaacaaaaagagaccgttcccttacaaaggaagaaagggaaaacagaattgcggctaacagcgcggagatggaaaaagcaaaggctgttgaggcaaagaacaaagacgagattgcaaaattaatctccgaagcggagagttatctcaaggaacattttgataaggattattatttgccgttaaaggaaagctgtgagcgggaaaaagcgcttgcaaaggaaaaatatggcattaaagttgcggaactgaacaaagaacatgaaaaaaccctctcaaagcttacggaccatcaggagataaaggacgagaagtatgttcataagaaccgcctgtttgacgcaaagatggacctggacaaggagcttcagcggatcaaagacagaaggcatgcggcatttgtctggcagtatcacctgattgatatgctccgcctgtctaaattcaccttcatggagaccagagcgcagaaatgggagaactataaatatacattcaaccgcagaacattcttactgcagaatggtctgtatatcgctattatcctgattttcattggactgtgtatcgctgctccggtgatgaagaatgttaaactgcttacctataataacattttaaatatcctgcagcaggcttctcccagaatgttcctggccctgggcgttgcgggtcttatcctcctgaccggcacggacctttctatcgggcgtatggttggtatgggtatgaccactgctaccatcatcatgcatcagggcattaacacaggtgctgtgttcggacacgtgtttgactttacaggcatgcccataggattaagagtggtatttgcccttgtaatgtgtattatcttatgtacgtgctttacggctatcggcggtttctttaccgctaagttcaagatgcatccgttcatatcaaccatggccaacatgctggtcattttcggacttgtcacatatgccacaaagggcgtatcctttggtgccattgaaccggctattccaaagatgattattccaaaaataaacgggttcccaaccattatcctgtgggcagtggctgccatcgtaatcgtttggtttatctggaacaagaccaccttcggcaagaatttatacgcagtaggcggcaacccggaagcggcagctgtttcaggtatctccgtattcggagtaaccatgggagcattcattctggcaggtatcctttacggattcggttcctggctggaatgcgcaagaatggtaggttccggctccgccgcttacggccagggctgggagatggacgcaattgcagcctgtgtggttggcggcgtatcctttaccggcggtatcggtaagatttccggcgtagtagtcggcgtacttatattcaccgtacttatctactcccttaccattctcggtatcgacacaaaccttcagttcgtatttgaaggcatcatcattataacggctgtaacacttgactgcttgaagtatgttcagaagaagtaaggaaggttaggtgtttccgtccgtgattgaaataaggccgggggctgtggatacggcttcgggactagtagttctaggacgctgaaaatcggctaaatacaagaggctggctgccaaaactcgcggccaagcctctttctatatttagatactgagctcagacagttgtcagccagcctcttaacgccgctttccaccgtccaagaactacacgcccctgcagatgcatccacatcccccagccttatttcaatcacccactacgcacctcccttcgccaaaaaaaagtgatgcgccagccagactatcgttttttgtcagatataatacctggcatataaaatgatggaagaattttcacctggcattttttgttttatctgcgccatggatgtaagtgatgcagaagcaccgggtacgtagtgggtgagggaaagggagaggggggcgtgggatgcatctacaggggcgtgtaggggttaggctgcgggaaccggcgttaagaggctgactgacaattgtctgagcccgatatctggatacagaaagagactgaccgcgagttttggcagtcagcctcttgcatttagccggtttccggaggcttagccctactagccccgcagccgtatcccactccccctctccctcacggacggatgaaccttctcttcctccgcatcccttacttcccacaagctaacctgctattttgatactcccttgtaaacgtaacatccctcccaaaccactccggggcctggaaggccatggcttcttcttcggaggtgaattccacctcggccaggaggaggccggcgtagcggccttcaaagacgtccagttcaatggtcagatggtctgagccatccagcgggatgagatagcgctttttggtgagtaccacgccgtcggccttggggagcaggtgggcgtaggcctcccgggtcagggggaggttgtattcctccctggacaggagtcccttgcccttgtaggtgagatagaagctgtcatcctcctgacggatgcggaccaccggttccgtgcagagataggcctgttcaatctggtggaagggatgggcgtcatagccctccggaagacaggggaccaggaatttacgttcgatttccatatgggaaaacctccttgctgtgattgtcgattagtggattttactaagtatttttattttttccattttacaatcatatcatttaactcttttcctgaaaagtgataaatgataaaataaaattactatgcgataaatggcggaaagggagattatcatggcaaaggtttatgcatttcttgcggatggactggaagaggttgaatgtcttgcggttgtggacgtgctccggcgttccggtgtggaggtgacactggtgtctgttacaggagacaggaaagtaactggttctcatggaattgagttggggaccgacgccctgtttgaggatgtgaacccggatgtggcagatgtgctgtttttgcccggaggaatgccgggaactaacaatctgaaagcacatatgggtctgagggcggctgtggagtgtgccaacaagcagggcagaaggattgcggccatctgcgcggcgccaagcatcctggggagtatggggctcttaaagggcaggacggctacctgctatccgggatttgaggaccagctcacaggtgtgtcctacaccagccagggtgttgtgacggatggcaacatcaccaccggcaggggcctgggatttgcccttgacatgggactggaactgattcgcctgcttcagggtccccagcaggcccagaagattgcagcggcaatccagtataactggaaatagtatccggatgagaaaaactcctgttctgttctatatcatatggatgtgggatggaatggaagttttttttgtaaaaaacgctggtgtttttaaaatgagcatgctataatggtacattgaagtgtagcgccctcatggattatgggcgaaccacatatattttaaggaggaacccgtaaaaatgagtgtacaagtagaaaaattagaaaaaaacatggccaaactgacaatagagttaagcgcagagcagtttgaggatgctatgaaaaaagccttcaataagagcaagaacaagtttaatattccaggcttccgtaagggcaaagcacctcgcgccatgattgaaaagatgtatggcgaaggcatcttttatgaggaggctgctgatgaggccatcaacgcaacctgcatggaggcaatgaatgaaagcggactggagatcgtttccagaccggaagttgccgtagagcagattggcaaggacaagccgttcatctataccgcaactgtagccgtaaggccggaagtgaccctgggcgagtacaagggcattgaggtagagaaggtggatgcagctgtgaagcctgaggatgtggaagcagagctcaagaaggttcaggagcagaacgcaagacttctgaccgtagaggacagaccggttgctgacggcgaccagacagtcatcgacttcgagggatttgttgacggcaagacatttgacggcggcaaggcagctgattacccattgaccattggctcccattccttcattgatacatttgaggagcagctggttggcaagaacatcggcgaagagtgcgagattaacgtaaccttcccggaggagtaccatgcggctgaactggctggaaagcctgcaacctttaaggtgactgtaaaggaaatcaaggtaaaggaacttccggaactggatgatgagtttgcaggagaagtttctgaatttgacacgctggatgaatacaagaaggatattgaggcaaagattcttgagagaaagcagaaagaagctgcttccgaaaacgagaaccgtgtggttgacaaggtagtggcaggcgcttccatggagattcctgacaggatggtggaaggccagattgacaacatggttcaggatacagcccgccgtatggagagccagggtctgaacatggatctgtacatgaagtatacaggcatgaccatggagcagatgagagagcagatgaagccacaggccttaaagagaatccagaccagactggtgcttgaggaagttgtaaaggctgagaacctgcaggtttccgacgaaagactggatgaggagattgccaagatggcggccgcttaccagatggaggctgacaagttaaagggttatatgtcagaccgtgataaggaccagatgaaggaagatattgctgttcaggaagcggttgatttcctggtagcagaagcaaaactggtataattcacatatgatacggggggttcacagcgcttatttacctggctttgaatctccctggtttcttataagtgaactggtcaccgcaccggacttgtgaaatacctggccgggagacggtggcatgtatcgcacgtaagtgtctgaaaaacagacgtttagtgctcataactaggaggatggttatatgagtttagtaccttatgtcattgagcagaccagccgcggcgagcgttcttatgacatttattcaagattactgaaggagaggatcatattcctgggcgaggaagtaaacgatgtgtccgcaagccttgtggtggcacagctcttattcctggagtcagaggacccaggcaaggatatccatttgtatatcaacagcccgggcggttctgtatctgcgggatttgctatctatgataccatgaactatattaaatgcgatgtatctaccatctgtatcggcatggcggccagcatgggcgcgttccttctttccggaggggccaagggcaagcgtttcgcgctgcctaatgctgaaatcatgattcatcagccttccggcggggccaagggccaggccacagagattaaaattgtggctgaaaatatcttaaagacaagaaagaaattaaacgaaatcctggcagcaaacacaggaaagcccctggaagtaattgagcgcgatacagagcgtgacaattatatgtctgcactggaggccaaggaatacggccttattgatgaaatcattgcacatcattagtgctgcagtacagcgctgaggcatcaggccggtaacgtaaaaaagcaagtaaaggatatgaaaggttaggtatcgtatgccaatgagaccagatgacacgattcggtgctccttctgcggaaggacacaggatcaggtacggaagatgattgccggagctggcaacaacaatgtgtatatctgtgacgagtgcatagaattgtgctctgagattctggaagaggagctggaaggccaggatgaaggggagagccctgcgctggccgatatacgtctcctgaagccaaaggaaatcaaagcatttttagacgaatatgtcatcggacaggatgacgccaagaaggtgttgtccgttgcggtttataatcactacaagagggtgacggcatgccagaacatggatgtggatgtgcagaagagcaacatccttatggtggggcccacaggctcaggtaagacctatctggcccagaccctggctaagattctcaatgttccctttgccattgcagacgccactgcactgacagaggcaggatatgtgggcgaggatgtggagaacattctgttaaagcttatccaggctgctgattatgacatctcccgtgccgaatacggcattatatatattgacgagattgataagattaccaagaagtccgaaaatgtatccatcaccagggatgtttcaggcgaaggcgtccagcaggcgctgcttaagattctggagggtacagttgccagcgttccgcctcagggcggcaggaagcatccgcaccaggagcttcttcagattgataccaccaacatcctgtttatctgcggcggtgcctttgatggcctggagaagattgtggagcagcgtctgagcgctggttccattggtttcaacgccgaggtggcaaataagaacgatctgaacatagatgagctgctcaagaaggtggagcctaaggatctgaccaaattcggactgattcccgagttcataggccgcgtgccggtgatggtttcactggaacagcttacaaaggatgccatggtgcgtatcctgtcagagccgaaaaatgccctgatgagacagtatcagaagctgtttgagctggacaatgtaaagctggaattcacccaggaggctctggaggagattgcacagctggcagtagaccgcaagattggcgccagaggactgcgctctatccttgagtcagtgatgatggaccttatgtatgagattccgtccgacgattctatcggaatctgtaccattaccagagacgtagtgaaaaaggcaggacagccggaattagtataccgcgatatgcctcctgcatctgcccggaagccgttgtcagaacggctcagaggggacagtaagacaggagaaattgcgtaggctgtcatgctcctgtgacaatttagaagagagaaagggccgctgcaaatcagatatgacccggaccagaaggcctgttttccggccggtccggcacctgcattgcagcggcttttcaaatggttaagatacaagaggtgaagattgagaatgggagaacaagtgattacgatgcccgtggtggctctcaggggtctgaccatacttccgggtatggtattgcattttgatataaacaggccgaaatcggtggcagccgtagagcgggctatggtgggagaccagaaactgtttcttgtggcccagagacatcctgaaattgtggagcctgagcagggggatttgttccaggtaggtactgtggcagtggtgaagcagctggtgaaactgccgggcaaggtggtacgtgtgctggtggaaggactggaacgcgctgagcttttatgcctggaagctgaggaaccggctatgatgggcgagattgccgccatagaagcggaggaggatgatctggacagcctgactcaggaagccatgctgcgtatcctgaaggacaaactggaagaatatggaagagttaatccgaagattacaaaagaaattctgcctaatctgatgattattacagatttaaatgagatgctggaccagatcgccattcagctgccatgggactataccatccgccagaccgtgctggagaacagttctctgtcagccaggtatgaggtagtgatgcatacgctgctgaccgagatggagatatacagaattaagaaggaatttcaggaaaaggtaaaggccgatatcgaccagaaccagaaggaatatattctcagggagcagatgaaggtcatccgccaggaattgggagaggacgctgtgtcggacgcagacgaatatcagaaaaagctggatactctgaaggccgacaaggaagtaaaggaaaagctccacaaagaaatagagcgtttccgcaacatgccggccggaagccaggaggccaatgtgctgcgcacctatgtggaaaccctgctggacttgccctggaagaagatgtccaaggacaatgacgacatcaaacatgccgagaggatactcaacgaggatcactacgggctggagcaggtaaaggagaggatcctggaatacctggctgtccgcgccctgacgaagaagggcaccagccctatcatctgtctggtgggacctccaggaaccggcaaaacatccattgccaggtccgtggccagggctttgaataagaaatacgtgcgcatcagcctgggaggtgtccgggacgaggcggaaatcagaggccacaggaaaacctacgtgggcgccatgccgggccgtatcgtggaaggcatgcgtcaggccagtgtgagcaatccactgatgcttctggacgagattgacaaggtcagcagcgactataagggcgatacctcctccgcgcttttggaggtgctggacggggaacagaatgtaaaattcagggaccactatgtggaactgcccattgacctgtcccaggtcctgtttattgcaacggccaacaccacccagaccataccggggcctttactggaccgcatggagctgattgaggtcaacagctatacggaaaatgaaaagtttcacatagccagagactacctggtgacaaagcagatggagcgcaacggccttaaggagggacagattacattttccgataagagccttgaaaaaataatacacaactataccagggaagctggcgtcaggaatctggagcgccgcatcggggatgtatgccgcaaggctgccagacagttcctggaggataaaaagaagtccatcaagattacggagagtaatctggagaaatacctgggcaaggaaaaggtgacctttgagaatgccaatgaggaagatgaaatcggcattgtgcgcggcctggcctggaccagtgtgggaggggatacccttcagatagaagtcaatgtaatgcctggcaagggaagtctcctgatgaccgggcagctgggagatgtgatgaaggaatcagcccagacagccctgacctatgttcggtccgtgtgcccggtgtacgggattgccgacgattattttgagaagcacgacctccacatccatatcccggagggagctgtgccgaaggacggaccttctgctggaatcaccatggccacagccatgctgtccgcggtgacaggtaaaagtgtccaggccaaggtggctatgaccggggagataaccctgcgtggacgggtcctgcccatcggaggactgaaagaaaagatactggcagccaagatggcccatatagagaaggtgctggtacctgacaagaaccgtccggatatggcggagctgtccaaagaaatcaccaggggactggacattgtgtatgtaaaggccatggaggatgtggtttcggaggcctttgtttagagcgcggataggaattaggagaaacagatatgataataagagacgtgaatctggagacagtatgcggcgtgaccagcaaactgccggagaatacactgccggagtttgcatttgcgggcaagtccaatgtgggaaaatcatccctcatcaatgcgctgatgaaccgcaaagcctatgcaagaacctcctcgcagccgggcaaaacccagaccatcaatttttacaacatcaacggagcattgtattacgtggacctgccggggtacggctatgccaagatagcggttgcggtgaaggaaaaatggggcaagatgatagagcggtatctcaggaattcacagatgctcaaaatggtgttcctgctcattgatatccgccatgaaccctcggccaacgacaagctgatgtatgaatggattatctttaacggataccaccctgtcatcattgccaccaagctggacaagattaaccgcagccaggtgcagaagcacgtaaagatggtgcgggaaggccttggcatggaaaaggacggtatcattattcctttctcggcagagacaaagcagggcagggatgagatatgggacctgattgagggcagcctgtaggctgtttgtattcctgttaaaaagcggatttcataaagtgaagaaaggcctggtttcctgacagacgggtattgcccgcaggaaatcaggcctttttgctaccggtaattctcctttaccagctcaataaaatatcttccataggacggaatataccggcccttctgatataccgcatacaaggtggtcacagtggcggggtctcccacagagaagcacagagggggattgtaaaagtgtatttttctgacataggattccggggccagacagagggcggtgccggaggcagccagacggatggcgatatcgctgttgcgggtaaacaggaggactttgggggttaagccggcctttttaaacagtcctgccgatatacggcccgttgtctggtcccgggggtggaggatgtagggctcatgttctgtatgtcttatatccacccagggatagcgaaagccttcccttgccatggctttttccgccaggggatgaccgggggctgccaccagaacgatttcttcctgccccaggtactccgctgtctgagcgggatccgtggccgtggaattatagatggcaaagtccacattgggggaaagcataagctgcttttcaacggaatgtgattcctccagaagattaatctgcacgtccgggtaacgggaatagaaccggctgagtacatccggcagcaggcaggaaccacgcatcagagccaccgctatggtcagctgccccttttcctcgcctaataaatcctcgcattccgaattccagtcagaacatatctggcagattttttccgcataatccatgtagcggttaccgatatgggttggaatcaggtcattgccaatacggctgaacagaggggagcccagctgacgttctatgttcttcacagccttgctcagggcggactgtgtgatgaacagggagtctgctgcctttgtgatgcttccatacctgcgtatggccagcatataccggatttcctttgagatcatgtatgtacctccaatgaaaataattcatgacttagatgattattatgactttgacacctacctatgcacattgtataataaaaataatatacaatcaagggtttcatcaatattgctgaatggaggcgccatggaaacagagagagcggattttctcgtaagaggagcaatggtttacaacagctactttaaaaagtttgtgccggcggatgtgtctgtgtcagggggaaaattcttatacatagattcccgaaggtccggcgcggtggaggctgatgagacagtggatgcagagggcctttatatggtgccggggctgattgacatacatatgcacatcgagagctccatgctgacgccgggagcattttgcagacggctggcagagtgcggcgtcaccaccattgtgtcggagcctcatgagatggccaacgtgaacggaatgcagggcgtgctggatatgataagggcaggggaaaacagcccggttgatatcttttacgggattcccagctgtgtgccctccacctcccctgagctggagaccaccggaggcatcataacctgtgaggagatggaaggcctgaaggaaaatccctgggtggcctgtgtgggagaggttatgaattaccgtaccattatccgggaaaaccagctggaaattacccggttcctcaaacaacttcgtgaaaaggaccggatctttcccattgaaggccattgccctgcactgctggacctggatttggccaagtttctgtacctgggcatcaatggagaccatacggagcacagcttggaagaactggaacagaggtttgccaacggcatgtttatggaaatccaggaaaagatgctgcgcagggaggtactggactacataagggagcatgggctggaggaacatttctgctttgtgacagatgatgtgatggctgacacactgtgtatccagggacatctggacgccctggtccgcagggccatggaactgggtatgccggcagagcaggcagtttataacgcctcctttaccccggcaaggcggatgaaccttttggaccggggggcaattgctccggggaaaatagctgacttcctgctgctcagcgatttggatacgtttgctgtctctgccacctataaaaatgggaaatgtatttggcgcaggggacaggacgaaagggaacagcccgcccaagagcagcatggcccggacaggggacaggatatgcgctttccggagccttattaccacagtatccatctggaattccaggagcagagccggtttgaggttcccatggaatcggattcaggcacggttatggtccgtgtcatggaaatccaggacgggtccaccaagacaaaggaaatcatcatggagatgcctgtgagggacggtttccttaaatgggaagggacgggctgtctgctggccgctgtgtttgagcggtatggaaagggccaggcagtgggatacggattggtaaccggagactgtcacaagcggggagccgtggctaccagctacgcacatgactgccataatattctggtggcaggagcaaatcctgcggatatgaagcttgctctcaaccgcgtcattgagatgcagggcggcatggctgcggcggacgggggaaggatacaggcagaactgccccttcatgtgggcggcatcctgtcggaccggcctgcgaaagaagtgggggccagccttgcaagggtccgtgaggccatgacaggcctgggttacaggcattataaccccattatgtcgttctgcacgctgacgctgccggccagcccggccctgaagctgacggataagggactgatagatgtaaaagcctgcaaaattgtgccgttaaaggtagaaggacagagaacacaaccgtaataactgcaccggagaaaatcaagaggaggattaatcatgtcaaaggaaactgaaggtacagccaaaagaggagcttccaatacctggattgacaggcaattccatctggcagagcatgggaccacggtaaggacagagattctggccggtatcaccacatttgtgaccatggcatatgtgctggggactgtccctaatatcatggcaaacgcggggctggacagaggcgtcatgctcacgtccatgattttactgattattgttaccacagtggccatggccctggtgacaaaccgcccctttgcactggcgcccgggctgggcagtgttgcaatcgtgtcgggaatgattgcgaacagcgggatttcacctgaaatcacagccggtgtcatattctggagcggcgttatttttattgtgatatcctatatcggcctcagggatgcggtggtaaatgccattcccgccagccttaagcatgcggtcagctcgggcgtgggcctgttcattgcgctgcttggatgtaagaacgcagggctgattattgccctggaaggcaaaaataacctggccttcggcgacctgagttctccctccgtgctgttggcgctgattggattcctgctgatactcatcaccaagcagatgcgggtgccgggatatatgattttttccattttgattaccacgctggtcgggattcccatggggtttaccaggatgcctgaggcgtttttcatggcgcccagctctccctttggccagtttatgaagattgattttctgggagccctgcagtttgcctatctgccctttctgattgccatgtttgtaccggatttcttctccaccttcggcacggccctgggtgttggcgcaaaggccggatttctggatgaggacggcaacctgcccggtatagacaaggtgttcaaggtggatgccgtggcaaccgctctgggcagcctgttctgcatgccgtgtatgaccacctatctggaatcctcctccggcgtggaggcaggagggaagacagggctgacacctatttccacaagtgtctgttttgcctttaccctgctgctgacgccctttgccctgatgattccgtcggccgcaacggcccctgcccttatcatcatcggagtcggcatgctaagttccatgcgaaacatcaattatgatgattttacagaatccttccctgcgtttatctgtgttgcctttaccatattcgccaacaatattgccaatggaatctgtgtggccctgccggtttacgtggtgctgaagctggcttcgggcaagattaaggaaatgcccaaaatcatgtatgtactgctgggagtatgcgtgctgtacttctacagtatcattaaatagtttatgtaagaacgctggattacgccattctgcacggatgctttttgcaggtggcaaggctcaccgccaccagcaggattccgcagacaagagcgcctggaacggtctcgccaagcccccagggattgccggccagtttccagcccacacataccacaaagccgcctgtcatggcagatatgatgccctggctggtggcttttttccagtacagggccgccagggagggcaggcctgccgccgccgcgtagaaggaccaggcaaacatgaggacattgtaggcgtttttaatgtacagggcgatgattaaggcgcccatggccagtaccacggacatgacacgggacatgagtatttcatgcttttccgtcatttccggcatgaaattttttcccaggtcatgtacaaaggtctggaccgataccagcaggtagctgtccgcagtggacatcatgactgacaggataccagccagagccagtcctgtaaggccgggaggcaggatgcttacagccagggcaggcaccacggcatcagagcttccgtaggaggccaccacgtccggcagaatctgccggcctgccagacccatgaagaaaaccagggcaatggttaccatgtaaatggaagtgccccagaacatgccctgggttgcggcctttttgctcttggcagcaaaggccctctgccacatctcggctcctgccagggtaaataccagataggtgacaatgtcgcccaggatactgccgttgatatgaggcaccaggtaggatttgtccaggttctgccagaaggaggaaaaaccgcccagataacgaatgctggaaaagggaatcaggatgtagacaaagataatcagcatgaaaaactggagcacgtccgtgtacaccacgccgaagagaccggatgcagcggtatagatgatgaagatgagagtggctgccagggcgccggcttcatagctgatgccgaattcatttcccagcatcttgatgatggtggcggtggcagtcacctgggcagccactgtgcccatcatggtgaagacgatcatgaaagccaggatacagcgggcagtgctgttgaacctgtagttgaaaagttccggtatggagttgatgtttctggtgaagccaacctcctgtatgcgtccggcgatggctgagaagataaacatgccgatgagataggggatagcggtcataaccgccttaaagcccgtggtataggcaatgcccgcacgtcccatcatggcgctgcctccgatgatggacgcgcacacagtggcagtcagcacaaaggggcccagggttctgcctgcaacgtagtaatcgcctgtattcttgattcgtttgacgaaccatacgcccacaaaaagcatgcctatcatgtagaggacaatgatgaccagatccaggttggtaagttcatgcataaatcagatctcctttcgttggggagccgccttgggagggggaggtgatgaaaaatatctttggatgtattcagttttaggtaaaggaaaagaacggacttaacaaaagaaaccgtctgcatggatgcagacggaaaagtatacgacaatacagcaaaatgatttaccagaatgtccctgtccctcttccgcctatgagattagctgccgggttcgggaaagaaaggttccctatcatccggaagccgcgacaggctcagacggatgaatacacccctaaaaatcggttctcccactgctgcatagcagcattaagcgacttggtgattatgttaacattatcttaacattaatatatcacagaaacaggagcgtgtaaagaaataacctgtcagatgcagcccatattctgtcagattcaactcagatcctgtcagattcaactcgacatatccggcatttagcgtataatagatacaggtatgaattaaataagacagccggcggcaatggaattttgacggcctggctgtatctggaggtattatgtaatggaaacgggacctatacgggtggcaatcatggcagacacccatggagtgctccggccggaggtggaaaggattctggaaacctgcgatgtgattgtccatgcgggggactttgacaatcagatgctgtatcataagctgaatgtggaccagcccctgtacgcggtaaggggaaataacgacaggggatggtcggggggacttggtcaggtgaaccggtttgaaatcggaggggttaaattcattatggcccatgagagagtggatatccccagcgtgcttaaggatattcaggtggtcatattcggccattctcatatgtattatcagcaggaaatcagcggaaggctttggctgaatccgggaagctgcggctataagcgttttaccctgcctctttccatggctgtgatgaccattgaggacggaacgtatgaggtggagaccgtctggctggaacatgggtacgggacgccaggggctgccaccagccagagggaaaaggccaaggccagcaagtatgaaaagcagcagaaacgctataagcagaagcaggcaaagggggaaggccaggcggataaggcaaagggagcggtcaaggcagccagatatgggggacagccggcagccaggcaggaagctgtcaaacctgccccagatcaggagaaggaatatctgttccttatagcgaaaatcctgcgcctgagaaaggccggtgaatccagagaatgggttatccggaacctgggggagaatttcaggctggcatcaaccatatacgatatatgcgaaaaaaagccggactcaaatgcccggcagattttggaactgttattggaacaaatctctttttagtgggaacgctttccggtggatggaacacaatgggacacacacatcccggcggaggacacgccatgggacacaccggcacagcaagtcaggataaaagtgaccgcatgacgtgggcatagatttcctggctttttgttttccaggtattgcacatggcttctgcctgctccctgtcagggacggataaatccagccggataagggtcgtcttattttcgcggacttcacagtggacaatgtagtcctgattagtccccttgtagaagtcggccgttgttcccacctcctcccggaggcggaacttgttctccttgaggtactggtccatgtcctcaatgatggcagtggatatgttcttgccgaagaagttgagggtttcctccccttccctggtgatgtcataccgggtgctgttgtggctggcctccttgtggaccaggccggcgtcttccagctcatttaaggcctgctggagggtgaaataggtggtgtattcatgctctgtgaaaaagttggtgagctgggcgttcgtcagggggaagttcacctgcttcaacatatagagattcatcagtttgtacaaggtcataggttcagtaagcatatcacacacgctccatcaggattttcttattattttctaatgtggtcctttaccgcgctgctgactacatctgccacacggggatcaaaggcttcgggaagtatgttctcgtcgcttaaatccttttcatccaccagcccggcaatggcttcggcggcggccagcttcatttcctcggtgatggcagaagcgcggccttccagtgcgcccttaaagattccggggaataccactacattgtttacctggttagggaagtcggaacggccggtcccgaccacacgcgccccggcagcctttgccaggtcaggcatgatttccggtacagggtttgccatggcaaagaggatggcgtccttattcatggatgcaaccatgtcctgggttacgattccgggagcagatacgcccacgaagatgtcagcgcccttcatggcatctgccagagtgccggtcctgtgctccaggttagtcacgtccatcatcttttcctgcatccagttaaggccttctgcacccttgcttaggataccgctcttatcacacatggtgacatgggaaaacccgtaggtcagcagcagctttgtgatggcaatgcccgcggaaccggcgccgtttactaccacgcggcaatcttccttctttttaccggtcagcctgagagcgttgatgacgccggccaggaccacaatggcggtgccgtgctgatcgtcgtggaacaccggaatgtccagcctctcttttaatgcctcctctatctcaaagcatctgggggccgagatgtcctccaggttgatgccgccaaaggcaggcgcaatgcgcacaacggtctcaatgatttcctgggtgtcctgggtatccaggcagatggggaaggcgttgacgccgccgaattccttaaagagaacagccttgccctccatgaccggcatggcggccagggggcctatgttgcccaggccaagtacggcgcttccgtcggagacaacggcaatggtgttggatttgatggtgtaccggtaagctgcctccggatctgcggctatcaccttgcagggctcggcaacgcctggggtataggcaagggccaggtcttccctggaagctacctttgcttttgatgtggtttcaagttttcccttccattcctcgtggagcagcagtgctttttcattggttgtcataatccattccgtccttttccttatatagtagaaacacaaaaatgcatttttatatatcataacaattttgggagtgtttatcaagttccttttgaaaatggtgctgtttggcagacctgtatgtttgaaatcagttggtgtgggggcgcctgcgcggcggcaggaaccgggggaggggaggacaaaagggaaatggaagaacatggaacccatggattgaacaaaagatgtaattaaaacttttaaaaccacccgaaatgtgatatcatgttacgtaagtgtggacattttacacagaaggataaagatacaggtggtactatgagggaacgtattaaccgtctggccaggggaatcattgacaatggttcgccggagctggtgctggcaccggaacgggtggaggcgtcggttcctgcgggtgaggtcatccgtggcgagatattggtgagcagcggcaataacctgcatataaaagggctggtgtattccagccatgaaagggtccgggtggtgaacagtgcttttggcgggctccgcaaccggattatatatgaagtcaacgtgggtttttcagagcatggagacgaaatcaagggatctttttacctggtcaccaatggcggtgagagggagattccttattctttgcgcgtacaggccggtgattccggtgaggttctgggaaacttaaagactcccagggactttgcggtgctggctaagaaggacctggaaaaagcgctgaggatgtttgagtatcaggattttacagaggcccccttcatgcaggattcccgggtccgtaccatctatgacgggctaaagggaagggccggcagaagaaatctgctggaggaattcctggtggccctgcaggtcaaggaaccggtaaagcttacgctggagacaggaaccaggatttatgagaatctgacaggaatcgcggaagattatatagatatagcggcaggaacctgggggtatgtgtcggcggacataaccgtggacgccccctttattgaactggggaccttccggattacggaccaggactttgtccagggccggtgcagagtggggtaccgcattgttccctccagacttcacagaggaaggaattttgggtgcatccgtgttaaatccctgcgggaggaattccttatttccgtggaggcagaggggcatcatgggtccggcagcacggagcgtgaatccggctcggatcggtttatggaccatgggagcttatataaatatctgtccctgcgtctggattatgaggcaggggtttatgagccggcccttctactgaaccagatgatgaaggagacagagcacctcagggctgattttccaggggatgcgagagccaagctgatacaggcagaacttcttatattaaacggcagggaggacaatgcatctctggctttagacgatgccagggatcatgtgctggcccacagggaaaagcaggtggaattgtactgcttctaccagtatctgcgcctggaaatcaagccgtctgtccagcagaaggaatcactggtccgttatatacgcaagcttttatgggaggatggggagatacggccttacctctttctgatgctggtgaagttggacgaaacaatggcacagaatccactggagctgtaccggtccatggcatccctgttcaatcagggctgctgcagcccgttcctctatgcatcagcctgccgtctgatggaagcccatccggatttgtttgtgcgcctgggcgattttgagattcagactctgtatctgggtgtacagaaaggaatcgtcagccgtgtaaccgctctgaaagcggcgggacttgcactggggcttaagcactacaggaagctggtggaacgtttattcacaaagctgtatcagacatatgaagagcaggagattctggaggccgtatgcagcctgcttatcaagggggactgcaaggaaaaggacgcatttgcctggtatgagaaagccctggaacagggagtaaacctgaccaggctatacgagtatttcctctattccctgccggaggattacggacacctgctgcctaaggaggtgctgctttatttctcctatgataaggatttggacaggcacagccgccagatgctctaccggaacatattggaatacatgaacccttccgcggagctgtaccagaactacaccaggcatatggagcagtttgccatggaacagctgttccagtccagaatcaaccgttccctggctgttatttatgagcacatgatttataaggatatgatagacagccgggtggccagggttcttccgggcatccttaagtcctgccgtatccggtgcggggattccaggatgaagtatgtcattgtccgctatgaggagctggaggatgaggaagcatttttgctggaagaccagtctgcatatgtgcctctgttttccgagcgcagcgtcctcctgttccaggatgcctacggcaaccggtatctggacgtgaaacactggaaggtgtctgtcatggaccgtccggagctgctggcccagtgctatgaggtgtatccggaccatcccatgctcaagctttccgaatgcagggacatcgtgaaccgcggggtggagacagacgaggaggcagcgctgttggaagagatcgtgacgcagatgcatctgagccctgcctttgagggcaggctgatgcaggcagtgacggattattactgtcagaaggcgtctgaggataaggacggcgacggtgtattcaactgtgcttatctggtacagattgataaaaagcccatggctgtcaggcagaggcagcagatatgcgagaccctaatcagccagaattatatgcgggaagcttataatatgattcgggattacggaagccagtatatatccacgccgcggctgatgaagctgtgcaccaagaccatactgatgaacctgtttgaccaggacgacctgcttctgggcctgtcccaccaggtgttctgccaggggtgctatgacagcgtgatcctggactatctgtgcgagcatttcaacggaaccgtgtcccagatgtatgaggtcctgattcagggcgtcagggagcatgtggagacatatgatctggaggaacggctgctggggcagatgctgtttaccggctgctgcgaccagatggattccgtgtttgaactgtacatgaaacgaaagaccacaaaggaaatggtggtgaaggcgtattttacccagaagagtgtccagtacttcctggaagaaaaggatatggaccagagggtgtttgaatatctgaagcaggcagtgggcaatacctttgacaaggacaggatgcccaccatctacctgctggccctgacccggtatttttccacgctggacaaggtggatgggggggatgcggaactgttaaagaccatgacctccctgcttttggaggaaggactggtatttccgtataccagagagctgtcaaagcatattccggtgcccgaggacatcatggataaggccatggtggaataccggggaaggaaggacgcccacccggagcttcaggtgagaattctgcccgaggaaacaggatttcacagcgaggacatccgccgcgtttaccaggggatttttgtgaaacaaaaggtactctttgagggagaaatcatggagtaccggatatatgactatctggacggacaccgcaggcttgcggcagagggacaggtggagtgcgaccataagctggagggaaaggagaacagccgttttgcctgcctgaacgagatgggagcagcaatcaaagacagggatgacagcaggcttttaaacgcgatggaagattatctcaagaagtcggcggcgcttggcaggctgtttcccatggagtaatggaggaactgtctatggacggtctagtgattggtctggatttaaatgacgactatacccagatatgctgttatgataaagaaaagtcgtggaccattcctacggtcatctgccggaggaaggaagaggaagtctggctctcaggggaagaagcctatgcggccaccctgctgggagagggagttatcgtggataaacttcttaagatggcggccaaggatgggacatccaccatcggaggcatctgctacggcggaggtacgctgcttaagctgttcatagagaagatgttaggatatcccaggaaggaattcggtacagatgaggtggcgcagctggtcatcaccctccagagcgtggactgcaggctgcttgacacccttatgtactgtgccgactatctggagataccaagggacagggtccatgtaatcagccataccgagggtttcatatactatgttctgagccagaaaaaagagctgtggaccaatcaggtggggctgtttgagctgtccggcgaacgcctgtgctattatgaaatgaaggtgcagaggggcatgcggcgcaatatggtccaggcagaggcccagaaccaggaggaggcctttaatctggacatcctggattcgccttccggcagccggctggcagataagatactgacggcctgcggtgagaagcttttaaacaggaagctgttttccacggtgttcctgactgggaagggatttgagcgccaggactgggccggcggatttatgcggttaatctgcaaccggagaaaggtgtttgtggagccctgtctctttgccaggggggcagctttcaagggggctgattatacccatcaggagacttcctatccctatgtatttatctgtgagggaaggcttaaggcggaggtgtccttaaaggtcatgcgcaggggaagggagaaccagctggtggtggcttcctacggcgacaactggtatgaatccaaaagctccatggatctgatcgtggacggacagaaggagattgagtttatcatcagtccgctggactccaagaagaaaaagctggtcaggattccgctggccggatttccggaacgccctccaaagaccaccaggatagagcttaaggtggcatttactgatgaagggaccatgacaatgtctatccgcgacaagggattcggggagctgttcccatcctccggcgcggtggtgaaacaagaggtgaatttatgagcctgatactttgcaggcaggaacctgtgaaacatccgtattatattgatgtgctgggaatccatatccattcctcccaggagctgtgttatatcgtatacaaccacccggttctggtgatggatgattttctggatgacctgctggttgattttatccgtaaggatttggacatggattatctggcagggcggatggagaagctggtggaaaccggcaccagaccagaggaggttctggcccttttcctgtcggaatgcgactattacagcgacaaggaaatacagaaattcaagcagaccacagcagctctgcgggccctgcatccggcccagtatgaaaagcagagggcggattacatgtttgggcagcagcagtatggcaaagcagcggccaggtacagtaaaattctggaataccccagggacaaggtggtggaggacctgtttctggcaaaggtctacaacaacctgggagcctgttatgccatgatgttccagtttcacaaggctctgggatgctatgacaaggcctatgagctgggaaaggatgatgcgctgttaaaacgcatttattttctcactgtctttgcgccggagctggatgtgaaggacaagtaccagtccgtgttcacggatgagcgcaagagaacgtggagcggggagatggacctggccgcgctggaggcaggacaggcagaggaagtcagggccctcagggcattatttaaaaaggatcccatcaaacggatgagcggcgcggctgagatggtgcgcaggtggaagcaggagtaccggatgatggtctgagtatatatggtgcgaaacggtttggagattaagaatatgataatgacggaggtattacatcatggcgtttgacatagcaaaggaacatctgagaaaggccggcctggaggatcggatttatgagtttgaggtatccagcgccacggtggagctggcagcccaggcagtggggtgtgagccggcccgcatcgccaagacgttatcttttatggcggaccagaaggctgtgctcatagtggccgcaggagatgccaaggtggacaaccataaatataaggagcagtttcatacaaaggccaaaatgctgtcgccggacgaggtgacagagctggtgggccacagtgtgggaggcgtgtgcccctttggagtgaaggaaggggtggcggtgtatctggacgaatcccttaaacggttcgatgtggtgtacccggcctgcggcagcgccagcagcgcagtaaagcttacgatacctgagctggagacagcttccgggtatcttgggtggattgatgtctgtaaagggtggggggaagatagtatataattatagtttgattggaaagctgattctggttatctggaatcggctttttcttttatttcatccatggtataccaggagatgcttccggcaattgactttttaccattatatattataaaaaacctggttttgtaaaataataaaaaaaacggaggtatcaatggatatggcatatacggtggagcaatttctggattttctgaaagaagaagaaaagtctgatgcgacaatcagtaaatacacctacgaattgcagatgttcctgcaatttttaggaaaaagggagattggaaaggagctgatgattcagtaccgcacctatctcagcagtaggtaccgcccacagacggtcaacggcaagctgtcggcagtgaacgcgtttcttaagtttacagggctgtatgagtacagggtaaaattcctgaaggtccagagaagggcctatattgatgaaacgcgggaactgacgcagaaggagtatgaacgtcttatggagacagccggaaggcagggaaaatatcagctctactatctcatgatgacaatatgcagcacgggcataagggtgagcgaattaaggtatgtgacagtggaagctgttatgagaggaaaggcggaaatctttatgaagggaaagtacagaattgtaatttttccaaagaacctggcagcccagctgaaggcttttgccaggaagaacggcatacgaagcggcagcttgttctgtaccaggagcggacgacctctggacagaagcaatatctgccatgccatgaaaaagctttgcgcaaaggcaggagtaaaaaaggataaggtatttccgcataatttccgacacctgtttgccagaagtttttatgcggcggagaagaatatggcccatctggcagacatattgggacattcttccattgaaaccacgcgtatttatgtggctgccagtataaaagagcatgaaaaaattcttaataaactgaaaattggggtaatcaacaaattaccacagaataaacattctgtggtatataattcgcttgtatttacttgcaggtctaaaaactctatacagtatatctaaaaaaacagtaatagtcaatatacatattcatgtttttcttcaaagcacataagccggaaacaaaaaacagggttttccggcgtctttgggtatccatatttcgtttttcattcaaggttacggattcaaaaaagtaaatttaatttcattttatcagatatttaccacagaatgtttattctgtggtatcaggaaaaccgccgtaatgaggaatcgcgtgaggcacaggtgcagggaggaatgggacaagtatccggattgaaaacataataagagacgataaaaaatcaatgaagaattggacagtaaatttattatacaaaactggggggggggggtgaaaacctccctgtttagcatgcaggagaggtgtgattttggcagacaagggaggaacaaaaggctgggttgacatacatgcccatatattgccgggtgtagatgacggggcctctgattgggaggaaaccggggaaatgctttgcaaggcgcataaacagggaattacccatatcatagccacgccccattatgtatcaggacaggacacaaaaagactgagggaaatgatgaaaagactgaaagagacggcattttccatatcggaaaatatgatggtaagtctgggacaggaagtacagtactttgaggaactgccgtccttcctggaacagggaaaggtgctgactcttgccggcagcaggtatgtgctggtggagttcctgccgggagacggatatatgcggctgttcagggcggtccgccggctggttcagtcatcctacctgccagtcatcgcccatgcggagcggtatgactgccttaaggagaagggcaggacaaaagaactggccaggtgcggcgcatatctgcagatgaatgccgggagccttggaggaggactttttgacagacgggcagcctggtgcagaaaggagatattgaggggaaacattcattttatagctacggatatgcatggggtagtgatacgtccgcctgagctggaggaggctgtcaggtggatgacgaggcaggataggaaaggacaggacgccgggggaatggccaagcggcttctccggcaaaaccaggagcatatactgagggactctgttttgtaaattgtctgcctggaaatataaataaaggaaatgtgagaacgatggaaaagcggtacagagaagatgacttggagatagacctcctggaattgttgtttgaatttaagaaaagggcatgggtaatcattctggctgcagtgttgggatgcctgggtgcgggagcttacagccgactgatattgactcctgtttatacatctacagccatggtatatgtcctttccaaagagactaccctgacgtcgctggcagatttacagataggaagccagctgaccaaggattacagcgtcatgattaccagcaggccggtgttggagcaggtcataaaaaatcaggggctgaatatgacttacggacagttaaaagccaggatacgcatatcgaatccagcggataccagaatactgaacatgactgtatcagatacagatccggtgagggccaaggccattgcagacgaggtggccaatgcttcctctgattacataggggatatcatggaaatgataccgcccaaaatcattgaacaaggagtggtgccggcagccccggcatctcccagcattaagaaaaacacggccctgggagggctggcatgtattgcagctgcctgcggcgtcataacccttaaggtgattatgaacgacacaatccgctctgaggaggatgtgggaaaatacctgggcatgagcgttctggcatctgtcccggatgacgatggtatggccaaagaacagcagcggaaccggagcaagagaaagctggaacgtaaaaaacgcaagacagagaaaaacagaaggggggaataggagtggacgaaatcttacatctgaaaaataccggcagaaaggattatttttacgaggaagccatcaagaccctgcgcaccaatatccagttttgcggaagcggccttaagacaatcatgtttaccagctccatgcctgacgagggaaaaagcgagacggcgtttgccctggcatcctcctttggaaacataggcaagaaggtactgctggtggatgcggacatccgcaagtccgtcatggtcaaacggtatgaaatcaaggggaatcccaacggcctgtcccaatatctcagcggacagaaaagcctggaggagatatgctatgaaacagacatggagaacctggatatggttttatccggtcccttttcccccaatccggctgaactgctggaggatgaactgtttaagacaatgattgagagcgtgaaggaaatctatgactacatcatcatagatacgcctccaatggcgaatgtcatagacggagccatcattgccagccaatgcgacggggcggtcattgtcattgaaagcggggcaatcagctaccgtctggtccagaaagtgagaagccagctggaaaaaagcggttgccgcattctgggagccgtgctgaaccgggtgggcggcggatatgaacacagctactatgagaaatattacggcaggcgcggcggcaagtattatggaaaatatggcaggcactacggcaggtatgaggagggaaaagcgccgcctgtcaatgaagtaagcggggcgcggataaagaatgacacaacagcgcaatcacaggatacatagcggtcatagaaccaataccggtcgtatcacccatgaggaccgtaaaagcggcaggttttatacccgcaggagacggatgcggacggcagtggccctggttttcattctgaccgcactgttcctttatagaaccggtcagttgtatctggaaagaaaggcattgtcccgtgaagcgcagcagtggcaccgcgtgcaggcagggaacaccccggcagaaccggacgggggagtggaatatcaggggaagagctaccggcgcaatacatatataaaggccatcctgtgcatgggcatagacaggccgggaagtctggaggagaccaggacggcagggtttggcggacaggcggacggcatattcctggtggcccaggatacggccagggaccggataaaggtgcttgtaattcccagggataccatgacggaaatcacattgacggatttaagcgggaacgaactgggcagctcaatccagcatcttacattggcatatgcatatggcgatggaagggaaaagagctgcaggtacatgactgaggcggtgagccgtctgctgggggggatgtccatagacggatacatggcagtgagcatgtccgtcctgcctttggccaatgataaggtgggaggcgtcaccgttaccatagaagagccgggactgaaacaggcagatcctgtttttgtccagggacagaccgttaccctgcggggagaacaggcagaaaaatatgtgcgctacagggatacgggcagggctcaaagcgccctggtacgaatggaacgccagaaaacatatatcaagggattcctggatgcagccaggaacaagtcaaggctggacgacagccttattccggacctgatgaaagaaatagaaccgtacatggtaacggacatgacaaaagaccggtatctggatatggcccttgattttttaggagggaaccaggattttacagatgcagatatggtgaccctgccgggaacagctgtggagaccgttatttacgacgaatatcatccgaatcaggaggaaatcatggaaatcgtgctggattggttctacaggccccgtgaatgaggacaggagttaaaaggggcaggagatggaataacgaaaaactggtcatgaagcaatttcctttagatggaaaagaaaggtggaaattatgaaaaaaagaaaagcaatcataactctggcaatggcccttaccgtgtctcaggccacatgtatactcgcagccaacagcccggggacaggcccggtcattgtgggaggcggaagcgacggaagcagccatgacatcggggaaaaggtggatcaaataaagggtggagcatcggcaggttccacggttaccagttccggacagggaaacaatgcagtgggaatagcggtgggacagaccgcaggggaacatgcggtggagaccaacagcagaggtcaggcagtgataggtgatactgccctggaatttgtacagggcgctaacgcagcagtggcaggtctgcctgagcctgtggtcaacacaatcaacagcataaacagcgggaagcccttaagcgaagcagtgcccggactggacctggcaggttataacgccctggttggaacccatgcaattatgacaaaggatgcagccaccaacacagagaagacagggcaggtggaggttcctctctatgtgccaaacctgctggacggcctgggtgacgtggaggttctgttttacaacaacatgacaggaacatggcagctcatcaaacccaccagggtggatgcagggtccaagatgctgtggtttaatgcgccgggttccggtacgctgtcggttgtatataaaaagtaagggacggatgaacgtccgatataaaaagtaggggacggatgaacgtccggttaagatacagcgaaagcgctgataacagggaagagtgtgaatgtgaaaaacgcagaaaccgtaaaaaacagggatagaatcatattggataaataccttccccgcagtaagcgggtgaggatgtgcctgctctgggcctatgacatggcggcagtatggatctgcgcctgtctggctctggggcttaggtttgatttggattttaacagcataccagcatcgtatgtacatgccttatggaaatacgggctgctgcagatggcggtggttacccttttattttatggcggccgcctgtacgccatcatgtggggctctgccggaacccgggagatgctggaggtggttctgatctgcatcattgccgctctggcccagcccgcaggtatattgatatccgggcagcggatgcccagaagctattatcttttgtggtttatcctgatgacaggggcagccatatgcggccgtatcagctttcaggtacttcagaggactgtgaacagaatgaaccgcgcctgggaaaaagacaccacgcctcaggtaatggtggtaggcgcaggccaggcagggaccctcattatccgggaaatgaaggccagccagaaaatccatggattcccggcgtgtatcgtggatgacgacagggacaagcagggacggttcatcgacggcgtggtggttgccggtacaagggacgacataccggagcttgtgaggaaaaagggtattgacgccatatatgtggcgctgccctcagcgccggtggatgatattaaagacattctgggcatatgccagaaaacaggatgtcaggttaagtatctgcccggtgtctatcagctgatgaatggcgaggtaaatatatccaggcttaaagaggtggagatagaggacctgttgggaagggaagccgtacaggtcaatctgaacgaaatcatgggctatgtaagggataaggtggtccttgtcacgggagggggaggttccataggaagcgagctgtgcaggcagctggcaggccatggggtcaggcagctcatcatatttgacatgtatgaaaacaatgcctatgaaatccagcaggagctgaaacgtaatgttccggatctgaatctggtggtgctaatcggatccgtccgcaacaccaaccgcttagattacctgtttcgcacatacaggccggatattgtataccacgcagcggcccacaagcatgtgcccctgatggaggacagccccaacgaagccatcaagaacaatgtgctgggcacctataagaccgccagggcagccatgcagtacggcaccgggcgtttcatcctgatatccacggataaggcggtgaatcccgccaacatcatgggggccagcaagcgcctctgcgagatggtcatacagatgtgcaaccaaaagagcggcactgagtttgtggcggtccgctttggaaatgtgctgggcagcaatggaagcgtgattcccctgtttaagaaacagatagaaaacggggggcctgtaaccgtgacccacagggatatcatacggtatttcatgaccatacccgaggcggtaagcctggtgctgcaggccggcgcctatgccatgggaggggaaatatttgtgctgaacatgggaaaaccggtgcgaatcctggacatggccgagaatctgatccggctgtccggttatgaaccctacagggatatcgacatccaatttacagggctgaggccgggagaaaagctttacgaggagcttctcatggatgaagaaggacttcagaggaccggaaatgaaaggatatttattgggaagcccattgaaatggattaccatcggtttgagaggggactgggacggctggatgaagccgcatggctggaaaaggataatatacgggagctggttcatgagctggtgccggagtaccattatagggcagaagaggatgcgtgtggggcaatgacagaccaggacgaggtttttgcacaggctgccgccggaatggagcccgggtacggagaaggaaccgggccggagcccgcatatgatacaaaggccggagcgggatctccggtaaagagcaggatggcgcttcataatgcaatggcagtatacagtaagaaacaggaaataactatgacaaaaaaggaaaataccaggatttagtttcctgaaacacatcacgcaaaggagggtgccggtgtgccggaaaagcccaaagtatatatacagacattttatggttttgacgtatttattaacggccgcgtaatctattttccaagcaaaaaatccaaggaacttctggctatccttatcaatcaaagaggaggaagcgtgtctctggcgcaggtggtacatattttatatgaaaaccttaaggagagcacagccaagagaaatatcagagtggtttatcaccggctgcgaaagacgctggaggaatatggatgtgaagaaatgctgatacataaaagaggtatattttccattcatacagaatggtttgaatgtgatttatatgagttcgtgaagggaaatgaaacctatatgacagcctatacaggaacatatatggcggaatacccctgggcctcggccaccataccatatctggacaagatttatgccaggatgaatgataacgataaaacccgtagggaaatttacagcgaggaatggattggatgaagatcaagacacggatgcagataaagaaaacattgatgcagatggttacatgcacatcagcggtcctggtcatatccgccatgcccgtatatggggcggacggatggcagcaggataccgcgcagcaatggttttatatggagcatgataagaaggtggtaaaccggtgggttacctgggcggacggcactccacggtatctgggaggcaacggtctgattgtcaccaacaactgggtgaatgcagggggagatcgttaccgcgtaaaggaggacggttcccgctatgaaaatgaatggttcagcgtcacatccaatccaagcctgccttcaggaaagccttccacggcctggtattatgccggggctgacgggaaaatcctggtaaacggctggcatgagctggaaggaaggtattattacttctatccgggaggcaattcacccagaacgtctttttttacggcagaggataaacgatattacgtggatgcggagggcgtcagaccggagcctggctggttttccactgagaacgtggacagcaaggggaatccctatgtgaactggtattacgtccagccggatggttcccttttgacggacggctggcatgagctggacggcataacctactattttgacaaaaacggcaattctcccaggaagcgctgggtcaacctggaggacaaccgttactatgtggacgacacaggtgagcttatgaagggctggttttccatcaccggaacatcctccaacggccaggaatacaccaattggtactatggtgattcaaacggcgtgctgtggcggggaggctggggagccattgatggaaaatggtattactttgatccaaacggcctgaattacaggaagcgctggtacatagacaatgtcaaagggaaacggtattacctggatgaagacggtgtgcttcaggataaaggctggttcaagattgagaatgtcaacagcgttaccaaggcagtgacagagagctggtactatgccggggaagacggggcggtgttaaagggcggatataagacaatcggggatggggcagcagagaatacggcagcaatggaaaggacttattatttcgatgcaaacgggctgaactaccggaaacgctggataacggataataacggtgacaagcgttatatgggcgatgacggagccatgaagaaaaaggaatggtttgtcatcagcggcctggactccaggaatgcggattataataactggtactatgcggagagtgacggaaaggtcatcgtggacaagtggcataagatagacgggaagtactactgctttaacgcctccggagtcatgcgcaagggctggcttacagagactccggaggatgacgacaaggagagctcttattactactgtgcggaggacggcgccagggcagcgggatggcaatggctggagataccggaaacctggatggataataccgatgtggcggattatgtccaggaacacggacagtatgcttacttttatttcagtacgacctcgggcaagaagaagcgttccagcagcggtaagcaggaaaaggatgtggacggcattacctattgttttgacagctacggcatcatgtatcccggctgggtgaaaatgagcagtactgtgcctgaaatcaagggataccgctatttttaccagccggagacagaaaaggacaagaagtatattcccggagaaaaggtggaaagcgcctggctgaagttggagggacctccggatgccagcggctcagggcagaaggagtggtattacttcgataatacaggaaaaccggtatgcggtggcgaggacagctatgagataaagaaaatcggtgacgggtattacattttcgatatgttcggcgcggcccagtacggcctggttgaggtaaagggcgacttttattactgcggcgcagaggatggggacaggaaatgcgcggtgggtaaagccatggtggatgacggcgtcagcgccacccgttcacaatattattttgatatcaaaggcaagggcatcacgggtatcaaggacggttatgcatactacaaggggaagatgcaaaaggcggataaggctgcccgctatgaggtgttcgacattccgggggaaggaaaatgcctggtaaatgccgccgggaaagtgatgaagaatacaaaggtgactgacggcaatggccagaaatgggagaccggggccggcggtagtattaaggtttacgggtcggatgaggttgcggagctggaggtgccggaggctacggtgtcgtattagggcggaatcttgtttgtattgagagaactgtaacctgggttgacttgaacctacgtctgaaattagcaaattgtgaacacaggcttatatacagagaaggtcaagtgaattgaaaataccaagaagatgtagttgatattctcaaagtttgggaaggcagccttgttaagtcagaggaaaaccgtcatcttggttattcgttaaccagaccaattcagagaaaacaaataagaggaagttaactaagcctgcactgaaaaaaattcggataggcatgttgtcatttagatagtttgaaaatgataaatagacgtgataggctggaacagtcaagaaattaatctcatcaagataacttgtaactgttcctatgggttcaataggcagattatcatatttaatgagagaatagtatcttgatatgattttaatagatctcctaaaatcctataggaatatggcaagcccgtatcagagagtaattttggtgcgggtttttgtcatgttcaaatataacatgtcaatcaaggaaagccttgattttacaaggagataagtatgtttattaatgaaaacaatttttttaagccaatttcaaagcatcagtatttgagttctccaaccatgcacagagaagaattggaatatatgagggaagcatatgaaaccaactggatgtccacagttggtgccaatatcaatgaagtggaaaagcagatggctgagatcattggatgcaaatatgcagtggcactgtccgccggaacggctgcacttcacctcgcgatgaaagtagcaggagtaaagcagggagataaagttttttgttcggacatgacttttgatgcaacagtcaatccggttgtgtatgaaggcggtattcctatatttattgatacggaatatgatacatggaatatggacccagtggcactggaaaaggctttcgaaatatatccggatgtaaagattgttgtggttgcccatttatacggtacaccggggaaaattgatgaaataaaggctgtttgtgataagcatggtgcggtcattgttgaggatgcagcagagtctcttggtgcgacctataaaggaaaacaaacaggaaactttggaaaagtgggaatatgcagtttcaacggaaataaaatcattactggatcagcaggcggagtgctcctgacagatagcaaggaagaagccgagaaagtcagaaaatggagtacgcagagtagggaaaacgcgccgtggtatcagcatgaggagcttggctacaattaccggatgagcaatgtcattgccggtgtagtacgtggtcagattccgtatctgaatgaacatattgctcaaaagaaagcaatttatgaaagatacagagctggatttaaggggctgccggtgcagatgaatcccattgagtatgaaaacagtgagccgaactattggctgtcctgcttgattatcgacccggatgctatgtgcaagcaggtgaggggagagggagaagctctatatattccaaaacatggaaagagctgtccgacagaaatccttgatacacttgcaatacataacgcagaagggcgtccaatctggaagccgatgcatatgcagccaatttaccggatgaatggatttgtcacaagagagggtaatggaagggcaaagacaaattcgtatatcgctggtgatgctataggcagggatggaatgccattagatgtcggtatggatattttccatagaggtttatgcctgccgagtgacaataagatgaaaccagaacagcaggatgttgtgattgagattataagagcttgctttgaatagattgaatgaggtgagggattatttgtgggaaatgtactagagaacgaagtgaaaccaatacacaagatgggaatctatgagaaatatataaaacgcccattagattttattctttcgttatgtgcaattcttgtgttgtcaccagtgttgttgcttgttgctattctggtgaaaatcaaattgggttcaccggtaatattcaaacaggagcgtccgggtctgtatggcaagatatttaatatgtacaaatttcggacgatgaccgatgaaaaagatgaaaacggaaacctgctatcggatgaaaaacgccttactggttttggaaagatgctgcgtagtacaagtttagatgaactgccagaattgttttgtatccttaatggctgtatgagttgtgtaggacccagaccattacttatgaaatatctcccaaggtataaccaaagacaacttagacggcatgaggttaagccaggtctaaccgggtatgcacaggcatacggcagaaacagtctgacttgggaagaaaagtttgagaaagatgtctactacgtggagcacatgagcctctggcttgatgtgaagattctgttcaaaacggttgcggtggtcttgaaacgagagggcattaatagcgaaacttccgctacaatggaagaatttatgggagtgcctgaagaggaaacagttggatgaatacattggtaattctcggtgctagcggtcatgggaaagtgattgctgacatcggtctgaaaaacgaatacgagaacatactctttctggatgataatgccacaggcaaatgtcttggtttcccaattgtaggcacatccgaagatttagaaagactgaatgatggcaagaccgatttcgtgattgctgttggcaacaatgcaatccgcagacgaattgcagagagccacgatgtcaattgggtgaagctgattcatccatcggcacagattgcattgggagttcagattagtaaaggaaccgttgttatggctggcgcgatcgttaatgccgaagtaacaattggcgagcattgcattgttaattctggtgcaattgtggagcatgacaatgtgctgggagatttcgtccatatatctcccaatgctgcacttggaggcactgttcatgtaggcgataatacccatatcggcattggcgctgtggtgaagaataatatagatatttgtagtaattgtacgataggagcaggaacagtggtagttgagaatttgtttattgaaggtacatatgtaggtacccctgcaaaaatcatcgcgtagggagggggcaaaatgcagtagcgtttgcctccatgctgtgttctctgaaaggaggattgcggcatgaacattttaatgtgcagtgttggtcgccgaggagagttgatcaaggatttcaagcagtccgttgaagtcggatcgaaaatcatttcgacggacaatagccctatgcactggcggcgtctttggcagataaggcatacctggtgccacggattgacgtaccggagtacatcgaaacgctgctgggcatctgcaaaaagagcagattcagttggttgccacctttattgacccggaaattgagatcctctccaagcatcgggcggagtttgcggccattggcgtggagctgctggtttcttatgaggagacggcgcacctctgctttgataagtttgagatgtaacaagcacctgaaatcccgtggtatttccaccgtggagacttggggtgatttgtaagatggacgatattttgaaattcatattgggagcattgcgatgagaagaatactatttttaacattattgggttttacgaatcttgaaaaccgtggaatatatccagaccttctaagagagtttgtcagaaggggagatattgtttatgttgtgtctccgattgaacgaaagaataataagaagacacatattgtaaaagaggattcctgggaaattctaaaagttaggacaggaaatattcagcaaaccaaccttattgaaaagggtattgctacagtcttactagagcagcagttcataaatgctataaaaaaatactattccaacacaaaatttgatttagtcctgtattctactccgccagtgacattagccagagttgttgcgtatatcaagaaaagggacaaagctttgagttatctcatgctcaaggatatctttccccagaattccattgatttggggatcttaaagaaaactggacttaagggcgtgatttataagtatttcagcctgaaagaacaaaaactctacaagctctcagatgtgattggctgtacatcagaagcaaatatacgatatgtgaaagaacataacgagttggataaaaagaaaatcattgagttttgtcccaactgttctgattggtatgatttatcgctgcctgataatggaaagaaagaggtgcgcaataaatatgggttacctgtagataagaaaatttttgtctatggcggaaaccttggaagaccacaggatgtgccttttatcgtgaagtgtcttgaagcgtgtaaggatatgaaaaatgtctacttcctagtcgtaggaagcggtacggagaagcattatctcgatgagtatgtcgaaaaagaaagctgctcccatgttagagtgatggggcaattgccaaaacaggaatatgattcaatgattgcctgctgtgattgtggcattattttcttggactatagatttacagttccgaatacaccgtctcgattattagcatacatacaggcggggattccggtgctgacctgtactgatccggcaacagatgttggagatatcgttgaagataatggttttggatggcaatgcaccagtgacaagatagaaaattttgtgcgactggtggagcatattgctaacttagatattgatccaagaatgaaagaaaacggacttaaatatttagaagagaattatacgccgaaagtaggatataaagctattgtgaagcatttaaacaaataagaggaggaactaaatatgtccttattcaaagataaaaccttaatgattaccggtggcaccggttcctttggaaacgcagtgttgaaccgctttctcaaaacagatatcggtgaaattcgtattttctcccgtgacgagaaaaaacaagatgatatgcgtcatgagtttcagacaaaaatgccggaagttgcagataaaatcagcttttatattggtgatgtccgagatatacaatctattaaaagtgctatgcacggcgtagactacatatttcatgcagcggcactaaagcaagttccatcctgtgaatttttcccgattgaagcggttaagacaaatgttcttggaacagaaaatgtgttgactgcggcaattgacgatggtgtagaaactgttatctgcctgtcaacggacaaggctgcttatccggtcaacgcaatgggtacttccaaggccatgatggaaaaagtcattgtggcgaagagccgcacgataagcaaaacaaaaatctgctgcacccgatatggaaatgttatgtgtagccgtggcagcgtcatcccactttggatcgagcagattcgtaaggggaacgctattacattaacagatcctggcatgactcgttttattatgtctctggatgatgcggtttctttggtcctttttgcatttgaacacggagaaagaggagatattttggtgcagaaagcttcggcttgtacgattggggttcaggcagaggcagtgtgcgatttgtttggcggcaaaaaagaagatattaaaattatcggtatccgacatggcgaaaaaatgtatgagacactcctgaccaatgaggaatgcgcacatgctattgatatggggaatttctaccgagttccgtgtgacaaccgtggcttgaactatgataagtattttattcacggagatacagagcggaatacattaacggaatttaattcaaataatacggatcttctttctgtggagcaggtaaaagaaaaactgctagagttggcatatatcagagaggaactgcaaaaaggtagcgagctgtagagtgatagtgcactgtgagtgaagataaataatagagaaaagtgagaccaaaaaaacactatgcagcagagggagagcaaatatttatgagatttttaatacttggcagcaatggtatggcaggaaatacaattgctgtctatttgaaagaaactggacacgaagtattaggatatgcaagggagaaatctttatattttgatagtgtcattggtgatgcatataatacggttcagttaaaagaagttatagattcaggaaattttgatagtatcatcaactgtgtcggacttttaaatcaattcgcagaaaataacaaacctggtgcagtatttttgaattcttacctgccgcactatttggcgggaataacagagggaacatcgatacaggtagttcatatgagtacagactgtgtattttctggagaaaagggaaattatttagagtctgattttccagatggaaaaaccttttatgatcggacaaaggcgcttggtgagttgaatgatgacaagaatattacacttcgtaattcaattgtaggtccggatattaaggcaagcggtattggattattgagctggtttatgaagcaaagtggcaccatcaatggattcacaaaagcaatgtggacaggacagacaactgttcaactggcaaaaacaatggagtatgtagcgaaagaacgcatgggcggcttatataatgcggttcctcataactctatcagtaaatacgaattgttgaaactgttcaataaatacttgagggataattctgtaacaatcaatccggtagagggcatagttgcagacaagtcccttgttccgtccaagctgggggacgattttgagataccgaattatgaacagatggttgcggaaatggcattatggatgagagcacataaagagatgtatccgcactatgaattgtgagagacatatgatgagagaggaaacgatatgagcaaacttaaattgatgacgattgtaggcactcgtccggaagtcattaagatgtccgcaataataaaaaaagcccaccagtattttgaccacattcttgtacatacaggtcagaattatgattacgagctgaataagattttctttgatgatcttggcttgagagagccagatcattatctgggtgttgtaggagaaaaccttggtcagacaatgggaaatgttatctccaaatcctatgagctgatgagtgcagtaaaacccgatgcaattattgtcttgggagataccaattcctgcctctgtgttatttctgccaagagattgaagataccagtatttcacatggaagccggaaaccgttgtaaagatgagaatctgccggaagaagttatacgtcgcatcgttgatgtgacgagcgatattaatctctgttattcagaacacgcacggcggtacatacttgatagtggtgcaaaaccagagtacacatttgtggttggttcgcctatggcggaagttttgacagatcataaggaaaaaatcgacagcagtgatgtgctgaagcgcttgggattagaggcgaaaaaatatattcttttgtctgcacatagggaagaaaatataaatatcgaagagaattttttttctcttatgaatgcagttaatgcgatggcagagaaatacgatatgcctattctttactcttgccatccgagaagtaagaaatatattgagcagcgtgggtttatttttgataaaagggtcattcagcatcaaccactcggattttttgattacaacaagctgcagcaaaatgctttttgtgttgtgtcagatagcggaacggtgccggaggagggtgcatatttcaaattcccggcagtatcggtgcgtacctctacggaaagaccggaagctatggatcagggcgtgtttacaattggttcgattagcacagaacaggtattgcaggcagttgaacttgtaacggcaatgtatgccaatggcgatctagcagcggaagttccgtgttatcaggacagagctgtgtctacaaaggtcattaagatcattcagagctattcgggcattgtcaataaaatgatttggagaaaataaatgaggattctagtgtatgatgttgccgccgaaaatggcggtgcagtgaccgtactgaactggttttacggcattcataaagaggacaaagagaaccagtatgtgtatctgttgggcaaacatacactggagaataccgataatattacggtgatcaatgttccggaagtaaaaaaaacatggttgcataggttgtggtttgattatataggtgttaaaaaatacctttgcgactataagattgagcagattctatccttacagaatacggatattccattttgtaaattgccacagactgtttatatccataacgctttgccgttttctgaacatagatttagcattgatgaggataaaaaactgtggatttatcaaaatctgattggatcgatgatcaaacaatctatcaagagagcaaatattgtgattgttcagactaactggatgaaaaatgaagttgttcgtcagacaggaatatctgaaacaaaggttcaggtcgtatttccggagataaatttatttgaggatgtaatttggtcaccgacggataaatgtacgttcttttatcctgcaagtgatgcaaggtttaagaatcatgatgttatattggaggcttcaaagctgctatatcaaaaaggtatcacacaatttcgatgtgtgtttacgctaaaaggaaacgaaaattccagaatcagcaggatacaggaagaagcagtggattgtggtatggatttcttgtgggtaggacagcaaaatcgggagcagatgagcgactggtatgcacagtcgatattgctattcccgtcttaccttgaaacggttggtttgccgatatgtgaagctatgtcagtcggtgcaccggtattattgtccgattgcttgtatgcaagggatgtggcaaaggaatatgcaaatgcaagatattttgttaaggacaatgctgcggcactggcgcagttgatggaagtatgtatagtgaagagacaggataatggaggggcacgataatggtaagaaacaataataattttatatatacatttctatcaattgttgtggtgcttttcctggttaacagatttctcatgcccattactatggtgcttgcaattgttctgctgtacatgatggcacatgagggaaaagtagccctatacatgaatcaaattacaaagttgttcgttgtaattgctggaatgggtattgtatacatggtactttccatatttggcggattctctgcattggggagcagtcgttatgcagtaaaagagattgagagaggcattatatatattttgattgctcagataataatgcgttccaaggtagatattagaaaatatatatctatctggaatatgctcttaacattgtctgtagttgttgccatactgcagtttaccaaagttattgatatgaatacaatactgaagaacttctatggcgatagtattcaattttacaacacacaatttactgtattatccagttttcgttgtggttcaatttttgtgaatccaaatgtatttgcgtgtttccttgttgcgtgtctgggcagtcacttggttgtatcccgaaaatatggctgtggctttatgagaaatattgttgtttatctactttgcattattgggttcgtgttggcaggatcacgcacaggttttgttttaggtgtggtgattcttatttatcatttgtttacagaaggaagagcaaatcaaggatatgcaatgcgttttctgggaacaatgctgttcttctttctgatcttcgtcttattcatgaatctaactggaaatataggttctggtattttggatgatctgagactgtttaaagtaaatgagggcatgagtaattcctttggcggcaagatcagtatatttaccaatttgataaaacaaatgcagccgtggaattatctgattggctatggtccgtttgattactctttgtcttccagctttcttgtggattttgacttgggttatttcattgtttactatggactgattggaattggtctttatgtggcgatgttacgctctctcctccattatgagtttatggatggaacaactgatcataggctgccgaggatgttggttgttattatgattgtgtttggtctgaccgccggaacctactttaatttgagaatctttgctatttatatgctgatgtttttgccgatgctggctaacaacagagaaggaatcgaggcttgagacatgggaaaatatatactatcagtagtgggtgcaaacggtcaaaataatgcaggatcaaaggcagggaatgacgttcttcgtgtttctcaggagtgtggttataaactaatccctctttatgaaagcaatcaagtaagaacaagagtacaggatatcatttccggtgttattgcaacatatagccttcggaataagctggtggatggagacattgtcttaatgcaatatccgctcaaccggcttttgatgaaaaacatattccgcattctgaagcggtgcaaatcaaagattagaattgctaccttgattcacgacattgattacttgagagacatcccattgggggataagggcgtagatggtatgaaagtactggaactgtcattgcttggcagttctgactacctgatttgccataatccgttcatgattaggacgttacaaaaggagaacctttcagtggaatatatttcgctggatttattcgactatctttatgatggtactccggccaccatttctgaagataaatcaactgtaattgttgctgggaatctgttggagagcaaagccggatacttatatcagataaagaaggataaacataaatttgcgctttctctctacggctcgaattatgctgttgataaaatgcaaatggacaatgcgacttatcacggcagttttaagccggatgaattgattgctaatttatatggtgcatatggtcttgtgtgggatggaagttcaactgagacatgctcaggcagctatggtaaatatttgcgaatcaataacccacataaagtgtcactttatattgctgcaggaattcctgttgtaatttggaaggaagcagcattatgctcactcatcgaagaaaatgctcttggatttggtatatcatctttagatgaattggaagaagcactaaaaagccatgaacacttgtaccagagctatcgtaataatgtgttgaatatgaaagaaaaggtttgcagtggcggttttttgaaatacgttctggtgcaaatagatagaatggagtagataatttatgaaagttagtattattgtaggaagatgttaggtatagttgtttccgtttacaatgtagagagtttttatctatatgtttgaataacgaatttgacatcatgagaaaagatgacagctatatgcgctctcgttatgttgatgctataaatatacataattttttgatggcgttcatgtcgaaaggatttataatccgtactggcaaaaagattttgaaggagaggtaagatggcggaaatgaaaaaatgtttttcttttcaaaatggattcgattatgaagaattcaaagatatgtgcaattcctttaaaaaggtaaagttgcatagcaagatgaagtcagatttattgttgacggactatatcttttgcttggctatgagacggatttctatagataagagaagtattctcaagcgcctggcagcatctgtttttgattttcaagtccgaagttctgtaattggaactggaaaaatagctttcatatttactggaaatcagtatatgcggccagattatttgcagtgtgttgaaaatactgcaacccaagcaaggaattctactctgtttttgattgatcgaaaaagcacaaagttatccattagaaatatcattaaattgccttttatctttatctgggccaacaggctgaatgcgattgtccgtgatagatggattagcttggacatggctgtatctgtatttagatctgtcaatcaagcaaacttctttatcaatgctataaagaagtttaggtgtgagaaagtcgtgactttttgcgatcagtggagtattgataacgccctcactcagcttgcaataacacaaaattatcctactgcaacattacaacatggtaatggaaatgagatttttgccggtttttgtagtaattattacttggcaaacagtatgctgagtaagataaatgctatccaatgtggtatttcggaaaagcagattgttgtagttggtcctatgaagtatgctggattccaatttgaatatgaaaagacgaatgttctcagtaagatcggaattgtgtttgacgggctggataatttcaagaataacctagctatgctcaagtcagcacaccaagtggctgaacatctggagttaaaatgttacatccgttttcatcccagcaataaacgggaagagtatgctaaatatttatctgatacggatgttatttgcgatgatttgaaggagtttgaaatgattccagatttttatattacttatatctcgacaatgtatacggatatgctgttcaagaaaagaatctcctttcggtatgcaacgcaggagcccaatatgttcacgagtttgacggatacgaccttctctaatgccgatgaactggaagcagtggtaattaatgcgagagaaaattatgcggcgtgtcttgaatggcagaaagctactaagcaggagatatttggagcagatgagggcgtaaatcagtatcagaagttttttaaagtgtggggagaatcgtaaggatgataaagggaaatccattggtcagtatcattgttccggtatatggagtagaggcttatctggatcaatgtatcaacagtattgtagaacaaacatatcagaatattgaattgattctgattgacgatggtagttctgatcgctgccctgaaatttgtgatgcgtgggctacgcgagactgtcgcattcaggtactccataaagagaatggtgggcagtcttcggcaaggaatattgggcttgatacggcaaaaggagaatggatttttttcgtagatagtgatgactggatagagccggaatgtatttctgttctagtagagatttcgttggttaataatgcggatatatctgtgatttatccacagaatcataaaggaaatacggttattccaaaaccatttttcttaaaagacaaaggtgacgtgtattgtttgagtgcagaggatgccgtaacgtattttatggagcaagcggttgctgtcatgggcaagctgtatcgtgcagatatattgcaggatattcgtttccctgtgggacggaaggcagaagagtatattgttcagcttgctgcattaaaaaaagcaaagataatcgccttctgtaaccgaaatttgtacgattatttagtgcgcaacgattctgattcgcatgatattaaacctaaatatagagttgataatatacaggcgatcagtgaagcactggatatatgcagacgggattttcgctgtgaggaagaatgggcattcagatggctatgtgccttgctccatgagttttattctgtgtccgaatttgctaaggaagagaagaaaaaatataacgacatacttgtctatgcattatcccaggtcggtggcatggaacaaatatataagaagatggaacagccgcttgaccgtattatatatgttgccaaccaatatcagaaaatcttaaaagaagaggaatacaaaatacttcagaaacagtatagggaagtgtatagaagtcaggcgaaaagagaagtcaaaggtatcaagtatcggattgccaatctaaacctgaaattcctggttgcattatataacggcagggaggtaataaagtaaatggagttagtaagtgctatttaccggttcataacaatgaaaatataatagatcgatgtgtacagagcatccttgggaatacctataagaacttagaacttttgctggttgaaaacggctcagaggatgcttcttgggcgaaatgccttgcgtggaaggaaaatgatcatcggatcaactgtttgcagtcctccaaaggcgtatccgctgcccgtaatgctgcactaaaaaacacgattacattcatgctgactacagctgttgaacatacggcggatgttgtccagtgcagaagaaaagttgacaatgcagaggggagtggtaatgtggatgtttttcagggcgtagagctgacagatcatcatgatatactggatgccttcctctgcttccagaaaaactacaagtggacttcaacccgccgctgtaaatgaacagaaatatgtatgcgctctgggatcataaaggaaatattcgcaggataaaaagggttccagagttttccccaaaattcaaactggagctttggctgattgccagatgccctgttttgtatataagaatacgaaagctataggttttgaaaaaacgcattagaagtaatgcgagatgaagcataatacaaaacaataaaaggaaggtagtaaaatgttggaaatcgtaacgagtctgattccgtcgagactgatcaggacactacgcctgaaaaaactaaaaaaaacatttcggggggcgggtgatatattctacaaatgtgtcatttaaggcaaaactcaccccaacatctgaaattgcaccggatgctggggatttttacaacgatattcccaacccagtcaacattggacatgatgtttgggtcggtagtaatagcacggttctgggtggaataaccattggaaacggtgcggtagttggagccggtgctgtggttaccaaggatgtgccaccttatgcagttgtagtcggtgttcctgcaaaaatcatcaaataccgttttgatgatgagaaaattgcatcgttggagcagatgcaatggtggaatatgagcgatgatgagttgcgccaaaagcgtgatttcttcaaaaataaagaataataggagagaagtttatgagcgagaaagttactgcaattatcccggcaaaaggcatgagcaatcgtctgccaagcaaaaatacgctggagtttggtgaatccaacctccttgtccacaaaatccgtcagctgaagcaggtggatgcgatcactgaggtaatcgtatcctctgaggatgatgacatccttacaatggcagataaggaaggtgccagagcaattaagcgtccttatgaatattctgcagagacacttcctttccaggatttcctgtactacatcactggtgaagccagagaggatcatgttatgtgggcttgctgcacttctccaatggtaggcgcagatgtctacagaaagggctgcaagacctattttgagaagctcaaagagggctatgattccctgatcactgtgatggagtatcaccattaccttctggataaggacatgaagccatacacctttaagtgggggccagaacatagaaattcgcaggatctggacaagctgtatttcttcaccgacggtattcaacttgcacctaaagcaagtatgagagagtggtattactatttcggtcataatccctatggcatggaggtagatttgaagacatctaccgatattgataccatctttgattatctgcttgccagaatgcagtatcacatggatgatgatgcgatgatggcaaagggtatcaattcgaaggatggtgaggcagtataccactatgttctcggaaagatgatttcacagttaagcgatgagaaactggctaaggctcttatggaaatgccggacggcaagagagcgaatgtacttggcttaatcaaataaagaaaggagtacgatttatgggcagattgcagttattggattgtaccttgagggaagcccctattgataatttgatgtggggagagatgaacatccacaagatgattcatggtcttgagatggcaaatgtggatattatagaatgtggctttttgaagaatgcagactatatcaaaggaagtacatctttccagagagtagaagatatcattcctttcctgaagaataagaagaaaggaaaaacatatgtagctttggtagactatggccggtatgacctgaagtatctttctgagtatgatggaagatccatagatgcaatccgggtgtgttttaagaagaatgagattgggttggtattggattacgcagcacagattcgtgccaaggggtatcaagtatgcgttcagcatgtagatacaatgggttttttcgatgaggagattattgactttatagaaaaagttaatgagttcaaacctttggcgtattctgttgtggatacctttggcgcaatgtatgaagaagatatgcttcactataccggtcttgcggaccaatacctctccaaggatattttgctgggcttccatgcccataataacctgatgctggcagatgcaaatgcccagagttatatcaacaagatgagcgcccaccgggatgttgtggtggatgcttctttgtttggctgtggtcgcagtgcgggaaatgcccatacggaattgattgcacagtttatcaataagaagcatgaggaaaagtacaatattgacgaattgttggatttaattgatactgttattgcatcagcacagaaggtgacctcttggggatacagcattccttactttattgccggaatttataatgcccataccttcaatgtgaagcagcttttaaagcgtcacaatattaagtcaaaggatttgcgtggcattattgaactgttggacgatgttcagaagaaaaagtatgattacgctctgctggaaaagctctatgtagagtattttgacaatcccgtggctgatgccctggcattagaaaagctgagcaatacattcaagaaccgcaatattcttctgcttgcaccaggtaaatcggtggcagcagaaaaggagcacattcaaaaatttatcgatgagaagaagacgatggtcatcgcagtcaataatgtgatcagcggatatcagttggattacatattctatagcagcacaaaccgatataatcttagaaaatttcaggagtgtgcccctgagacgaaggttattgttacatcgaatattcagggcgcaattgaagaagataccacggttgtaaactatagctctctgattaaattcggatgggtaaatctggatagctccgccatcctgctgcttagacttctgatacgttgcggcgtggaaggggtatatgtagctggactggatgggtaccgttcagcaggtgacacgttctataaaaacgatttggaaacaggcgttgaggataaggacagacaagaactgacaagagaaaatacagaaatgattgcggatattgtgcagacaaatccggagtttgagattcattttattactcaaagcgaatatagtaaggctttagaataaacataggagatggcatagtgatgttggaagaattaaaggaaaaagtttaaagaggtcttgccgcgattaaaccatctggtgtggcgtatgaggatttgtctgcaaaggacatggtcgttgttgatgtggatggtcatattgtggatggtagcttaaatctgtcttccgacaccaaaacgcatattgagttttttaaagcatttggagaaattggtgcaattccctgtacacgaaatcttacttaccgaacattccagaatcgcagcctgaattcgctgtttgtttccagagtgctctgccgtagccatggtccgtttgcgtggggaaaggatgcagcacaggttgtataccatgctgttgttcttgagaaagttgcaaagatggcaatttgtatccgcatgatttcgccaaatgcgaagccagctcctcaccatattctggacaagcattttatgcgtaagcatggatccaatgcttactatgaacaaaaaaatgattatgggatggaggggaaattgtgaataaaagtttatatctgatttttgatttggacggttgcctgattgattctagcgaagtccagaaagctgctttttttggcagctataaagaagtagtcggagatgaccattgtccgtcttatgaagagtatatcaagcatactggtgattctgttaatgggatgctaaaaaaaatggggcttccagctgcgatggcagcatcgtttcggagaatcagtagcgaatctgttgataagattttggtcaactgggaagccatgaagctggttcgtaaacttaagaaatatggctacaaaactgcattatgtacgggaaaggatcattaccgcacggtggaaatattaaaatactttcaatgtgatgatctgtttgatgtattgatttgcggtgatgatgttccagaacccaaaccctcggcgatgccaattctgaaagcaatggaagctttgggggcagacccggagaataccgtcatgataggtgacggctataatgatataaaaagtgcaaaaaatgccggagtaaaatcaatattaactttgtggtatggagatgccggagttccaaaagtagcagactattattctgagacggtagaagaaatgtgggcaactattgatgaaatagcgtcctttacagcgaatacgtaatgagcaattctgaaaaatatgggagaataaaatgcaaaaaggcagagtgaaaaatgtttccagaaatatgattttcggaggaatattaaaagtatatcagataataactccttttattatcagaacaataatgatatattccttgggcatagaatatgtcgggttaaatagcttatttgcatcggtacttcaagtgttgaacttggcagagttaggggttggctctgctatggtatttagtatgtacgaacccattgcccaaaatgatcatattacaatatgtgctttaatgaagttgtataaaatatattatcgtattattgggatcattattttaggtgcgggtattatcgttttgccatttatcccacatttaattagcggtgaagttccaggtggactgaatgtatataccttatatatcttgaatttattggctacggttttctcatattggctatttgcgtataaaagttgtctattaacagcattccaacgaaatgatattattagtagatcacttcttgtggtcagcacaattcaatatgctacacagattgtagttttggtagtgtggaaaaactattatctatttttgcttcttgctctttccgcagtattgcttaataatgttttaactgcatttatggcaaatcgtttgtatccggatttacaacctaaagggaaattagatacagaggtagttaaaaatattaatcagaaagtaaaagatctttttaccgcgaagattggaggagttgttgttaactcggcagatacaattgttatatccgcgtttttgggtttgactgcgttagccgtatatcaaaactactattatattctttcagcagtaatggggatcaatcaagtgatatataaagcgtgcttggctagtataggaaacagcatggtgcttgaaagtaaagaaaagaattactgtgatttcaagatgatatcaatgttgtttatgtggctaattgggttttgtacaacctgctttgcatgcctttttcaaccatttatggaaatttgggtagggaaagatttgatgctgagctatttgatggtgattctgttttgcatttatttttatttatgtgaaattatgagcttgtttagcttatacaaagacgcggcaggaatttggcatcaggatcgatttagacctttgattgaagcaggggcaaatttggtagtaaatcttatattagtaaagcctatgggcttatatggaattctaatctcgacgataatcagtatgtgttgcataagtattccgtggctgtataggaatttgtttaaatatgtttttgacagatctgtttccgaatatacgaagatacttttaggtggaactgcaatcatgatatttgtaactactggtgttgcattacttactagatttattccgttaagcggaaacattggattgtttgttcgattgcttacatgcataatagttagcaatactctatactatttgctatttaagaaatttgagacttttgcaaaaattcttctgcttatcaacagaataacaggaaaaagaatatttaaggttagtatacaataatgaatgaggagaagatttgttttgaaatacgattatttggtaatagcaggactggaaacagtgtggcgtagatatcagccgcaccacgttcccaggacggcgggcgcagacgaattcctacatgtggctgtttcgcagcggcgaagacggagaaccgccgatcatcatctacaagtattcgtcaacgcgggccggggacaatgcgaaggaattcctggaagggttccttggatatctgatgtgcgacgggtccagtggctacaacaaagtaccgaatgcaaaacggactgcctgctgggcctatatacgcagatatctgatcgacgcgatccccaagggaaagcagctcgactacacgcaggcatctgtccagggggtcatgtatgtcaaccggctctttgaactggaggataaaatccgccggaagtacgccgggaattatgaagccatccggcaggcctgactcgaaaaagagatggccacaactgctctgctgcatttagctctggattacttttatccatcgcttgttttatgatttcaagggatggcttagcataatatattctagttgtctgcgtagaagcatgaccgaggattcttgacacaagttcaagcctttcaaaggcgatagtagtaggtatctcttgaaatatttttctgccggctccattcaataattaccataccttcaggtggtacttttttgcaactaaacttgtttgaggcattttctaaacttcacactcatggagggtgggtggggagattatctcagatattgaatagtattataaagtactaatggtagagtttttgaatcacttacaaagaaatttcccctaggaggtgccatgttccatccacgcaaatatctgtttcgtttcctatttcttttttccatagcggtcatcctgtatgccacattataccgtgaaacaggacaaggagacatacagctccagcttttctggaccataaaaagggcctggagagaacattctggcaatcattggtatatgattcttggtaatatcgccctattcatgccattcggatttttctttactatcattctccgaaagccggactggaagaaggcagccatcataggatttgttttttcgtctgttatagaggttactcaggttctgacggataggggactaggagagttggatgatgtactccacaatacttgggggagcctgatgggatattgtgcagcagtgatactggggtatttgttcggacggcatagtaaccggtataaaggaaaagtgaaaggggcaagtctgtttttcggaataacaatattggcgtttgcaatattaatattttataaccagccggactggaatgtacgtttgcggagatagcattagcagtgcttaagaatacggttttccggcttggggagcggggatgacaggataagctgtacacaaatacctgccaaaactctgccagagtaccagcgcaagcttccaccagcgcaagcttcaccaaaaaacacttgacaaatcccccaataattattatgcttgataattataaatcaaagcaaataactaaacaagcaaatcattaaaacaaagcaatccaattaaacacaacggttacgaagaagaggagtacatcatataaaccatcagagagggcggtccactggctgaaaggcggcccgggcagagtatgatagaaggtagcttctgaactggagcggtgaaggataaaactgagtgactggcatgcggatatttccgtattgccgccatgtaaagtttccttctgcgtagctgcttccgaccagcctgcgttaaaggcctaatgagactgccggacatccggcaaaacaaaggtggtaccgcggacactccgccctttgccttcccttaaccgggattggcgaagggctttttattttcaggcaaacagggtctgtctgccggcagccatttttctgtaattaaccaaaccgttaatgagtccatcaacaaaaacattaacagacccattaacaaaaccactaacccaaacaaattagttactataattacaaaaattacaaaaactaattacaaaaactaattatcaaaactaattatcaaaactaattacaaaaattaattatcaagactcattattaaaacccattatttagaccaattacaaagagccattacaaagaccaattacaaaaaccatctacaaaaaaggagaacaaaccatgaaggaactggagaaaacctacaacccggcggacatcgaagaccgcctgtaccagaagtggctggacggaaagtatttccacgcagaggtaaaccgcagtaagaaaccatttaccatcgtgatgccgccgccaaacatcacaggccagctgcacatgggccatgccctggacaataccatgcaggatattctgatccgctataagaggatgcagggctacgaggcgctgtggcagccgggtacggaccatgctgccattgccaccgaggtcaaggttattgacaagcttaagaaggaaggcgttgacaaggcagacctgggacgggacggtttccttaaggagtgctggaagtggagagatgagtacggcaccagaatcgtgaatcagcttcataaactgggttcatctgctgactgggacagggagcgttttaccatggaccatggctgctctgacgcagttctggaggtctttgtcaagctgtacgagaaaggctacatctataaggggtccagaattatcaactggtgtcctgtatgccagacctctatctctgatgcagaggtggagcatgtggagcagaacggctttttctggcacatcaattatcctgtagtgggagagcctggccgttttgtggagatagccaccacaaggccggaaaccatgctgggagacaccgcggttgcggtgaacccggaggacgagcgctatcaggacatcgtgggcaagatgcttaagctgcctctgacagacagggagattcctgttatcgccgacccgtatgtggacaaggaatttggaacaggctgcgtgaaaattaccccggcccatgaccccaacgattttgaggtgggcaagcgccacaacctggaagaaatcattatcttaaacgacgatgccacagtaaatgttccaggaccgtattttggtatggaccgctacgaggccaggaaggccattgtggctgatttggaagctcagggcctgttggtcaaggtggttccacactcccacaacgtaggaacccatgaccgctgcaagaccacggtagagcccatggtgaagcagcagtggtttgtaaagatggaggagatggctaagccggccattgaggcccttaagaacggcagccttacctttgttccggagagctttggaaagacatatctccactggctggaaggtatccgcgactggtgtatctccagacagctgtggtggggacacaggatacctgcctattactgtcaggaatgcggagaaatcgtggtttccaaggaagctccccacgcctgccctaagtgcggctgcacttcattaaaacaggatgaggataccctggatacctggttctcatccgctctctggcccttctctactctgggctggcctgaaaagacagaggatctggattatttctatcccacagatgttctggtgacaggatatgatattattttcttctgggttatccgtatggtgttctccggcctggagcagaccggaaaacttccgttccacaccgtgctgatacacggcctggtaagagaccccgaaggacggaaaatgagcaagtccctgggcaacggcatcgatcccctggaggtcatcgacaagtacggcgcagacgccctgcgcatgaccctgattacgggcaatgctcccggcaatgatatgcgcttctattgggagcgtgtggagaacagccgtaactttgccaataaggtctggaatgcgtcccgattcattatgatgaacattgagaaggctgcccagtccggcgaggtggctttggaccgccttaccatggctgacaaatggattgtgtccaaggtaaacacccttaccagggaagtgacggagaacctggataaatacgagctgggaatcgcccttcagaaggtttatgattttatttgggaagaattttgtgattggtatattgaaatggtgaagccaaggctgtacaatgaagaggacgatacaaaggtggccgctatctggacgcttaagcatgtgctgattcaggcgctgaaactgcttcatccctttatgccgtttatatcagaagaaattttctgcaatctccaggaggaagaggagaccatcatggtttcccagtggccggtttacagggatgactggaattttgcaaaggaagaacagtccacagagaccatcaaggaggctgtaagagctatccgtggcgtgcgttcatccatgaacgttcctcccagcaagaaggcaactgtttatgtggtatcggaggacgcagggctgctgcagatatttgagcacagcaaacgcttctttgccgctttgggctatgcgggcgaggtgattctccaggagaataaggaaggaattgcagacgatgctgtatccgcagtgattcacaaggcagtgatttatatgccatttgcagatctggtggatattgagaaggagatagagcggttaaggggcgaagaaaaacgtctggcaggagagctggcccgttccagaggtatgctgggcaatgagaagtttgtaaacagggcgcccgaagcaaagattgccgaggagcgcgcaaaacttgaaaaatatgagcagatgatggagcaggtgaagatacgtctggcacagcttcagtgatgaacccggagaaggattagggcggtgggggcaggcggaaagccagatacaccggagtaaaccgtatacaccgcggcagaccagatacagggatagagagggagagcatagcatgaatcaatcatcaggaaataagccggttatccatgtcaggatgttcggcggtttcaccatcacaatggatgaaaaggccatgtgcgacagcgataaccggtccaggaaagcctggagcctgctgagctatctgataatcaagcgcaggggagatgtgagcatcaatgagctgttccatgccatctggcaggacggtgttcaggataatccttacggcgcccttaaaaccctggtttttcgggttaggaagatgctggaggccgccggtttcccgtctcaggatttgattctgagccagaagggggcctacatgtggaacccggcctgggaaacagaggtggacacggaccggtttgagagtctgtgccggagaatcctggacccggaattggatgggaagaatatgtgggaggcctgcctggaggcatttgaactctacaggggcatttttctgcccaggtcatctgaggagagctgggtaggtcccatggctgcctattaccacacattataccagaagctggttgtttatatggcggaaaaactgatccgggataaggaatatgcacaggtggaggaaatctgccagagagctatcggcattgaccggtttgccgaggatttccactattaccggatttatgctgcgtatggacagggggaacaggagactgccctgaagcggtataaggataccacggatatgttctaccgggaacgtctgatgacgccctcagagcattttaaggaattatacaaggttatcagtaacagcgagcaggaggtagtgaccgacctggatgtgattcaggagaatctgggcacgggcggcgccggagaaggtcatggcgcgtaccagtgtgaatatgcggtgttcaagcgtctggtacagctggagcgcagaggcgtggagcgcagcggtgattccgtgtacctttgtcttttgactgtgggagacaggaagggacgcaccctgaagccggagatccaggcaagagccatggaacgcctgagggcgtccattcagaaatcccttcgttccagcgacgtttacgcgcgttacagtgtcagccagttcatcctgcttctgtcctccgccacctttgagaacagcgagatggtcatggaccggattctgtccgttttcaataaatcgtatgtgcgcaaggatgtggcggtgaattacagccttgacgtgctgaaaccctgattatcagaacctttatgacagcaaggcagttgtttttaactgcttcacattcattacatacagcgaggtcagactatgaagataaaaaatgcgcttttgctgctgctgacagcctccatatggggggtggcctttgtggcgcagagcgttggaatggattacgtgggcccacttacatttaactgcgtcagatgccttatgggtggtgtcgtccttcttccctgtatatggttttttgacaggaagaataaaaggaaggaacaggttcctgttatacccggagccaggaagaccctgattatgggaggaatctgctgcggtgtggccctttgcctggccagcaatttccagcagtttggaatccagtacaccacagtgggaaaggcagggttcataaccgcctgctacattgtcattgtccctgtacttggtcttttattaggtaagaaatgcagtcctgtggttgccggggcagtagttctgtcactggcgggtctttacatgctgtgcatgaacggcggggaactgtcggtgaacaaaggggatcttcttatgctggtatgcgcatttctttttgctgtgcatatcatgattattgacttcttttcccctgttgtggacggcgtaaagatgtcctgtatccagttttttgtcagcggcatcctctcaggagcagccatgctgatttatgaaacgcctgaatggagccagattatagccgcatgggcgccggttctctatgcgggcatcatgtcctgcggagtggcttataccctgcagattgtgggacagaaggggatgaatccaacggtggcttccctgattctgagcctggaatccagtatttcagttctggccggatgggtgattttagggcaaaggctttcttccaaggaagtactgggctgcgccctcatgtttggcgccatcatactggcgcagattccggtgggacgccgcagggaagcctctctgaatacggagggaaactagagggcccggtgcagaaggaaaatggtgttacagaaggcagtcaatcagaaaccagtcaatcagaaaccagccaatcatgcagaaaccggcaaaggggattcttgtcgcatcctggcgaagggcggcgagaatatccggttgccaattgaataaaattaggttaagattataaaagcctgtccggcagacaggcttttaagaaagaatggattttaattatgggacaagcagaggagtatttggaccgcattcccatgtggaccaggaaaaagaattcattggaggacgtcaggcggtttctggattatctgggaaaccctgaccgggacaggccggcgattcatgtggcagggaccaatggaaagggttctgtgtgcgcatttctcacctctattttaggtgaggccggttacagcaccggcacctttatctcaccacatctggtggaggtgcgtgaacgtttcctgattaatggggaaatggtggatcaggaaagctttgaaggggcttttgagactgtccttaaggccagcagaaagcttgcggaccagggactctgccatcccactttttttgaattcctgttttatatggccatggtcctgttcagaatgcatgatgtggatgtgatgattctggaaacaggcatgggcggcaggctggataccaccaatgtgctggaacggccggcggcctgtgtgattacctccatcagcatggaccataccaggtatctgggcgataccctggccaagattgcaggggaaaaggccggcattattaagaccggtgttccgcttatttttgacgacgggcagccggaggtctccaccatactggagggatttgctttccgcaagggtgctgccagatatccggtgggccgggatgatttttatgtggaggagataggcgaaaagggcctgtccattaacgccaggatgaaggacggcagatgcctggagctggagattccctttgaagctttttaccaggcggagaacgccatgctggctgtgcgcaccctggacgtcctgcgctatcccggagaatgtcccaggacaggatgccggatgccgggacacggtccctgcatctgcccggacggaaaggaatggggaatatcggaccagcacattataaagggcctgaaaaatacattctggcccggccgtatggagcaggtgaggccgggaatctacctggacggcgcccataatcccggcggtatcgaggcattcatacagacagccggagaaatttcggacagacagggaaagaagccgtggctgctgtttgcagctgtttcggataaggactatgagcgtatggcagaacagctgtgcagagagatgatatgggaagcagtgggcgtggttcatatgaacagtgacagaggactggcggctgaagagctggccagggtattcagaacctatacgtccagacctgtttactcatacggagacacaaagagcgcggttgaggatatggctgaaaagagccgggagggactgctgttctgcgccggatccctgtatctcatcggtgagattaaggctgtactggagcagaagtcctgagcagtcctgataagataggagtgatatacatgattgattttgaagaggagattgagcgttttaaaccaagcctggatgtggaagaggtggaggacgccattgttaagagcgatttgacggatatgacggacatcatgatggaactgataaaagaaagaggcgagcgggacctgtgaatacagactatgcaagaaagaaccagcagatagccaacagcttctacaacctgggcctggaaaaggccaggatacgggatctgtccggcgcggcccagtgcctgaagaagagcctgcattttaataagtatcagacagatgccaggaatctgctgggactgatatactatgagaacggtgaagtggcagatgccctggtacagtgggtcatcagcctgaacctgcagccggaggataatctggcggaccattatctggatgagattcagaggaagccgggacagctggagatagagagccagaatgtgaaaacatttaaccaggcgctctggcacgcccaaaacggcagcgatgatttggccattctccagctggccagagtggtggagtcaaaccctcattttgtgaaggcccatctgctcctggccctgttatatatggccagggaggactttaataaggccgggcgctgcctgtacaagattctccagattgacaagagcaaccagaaggccctgtactatatgtccattgtaaaacagaatacaggcagggctgatgcggagaagcgcaagatggtgaaggcattttcccatcggaagatggaggatgacgatgtcatcatccctaatacttataaggaaaatacaggtatttccactgtgcttcacatcattatagggctggttctgggcatcatggcattttattttctcattctgccggccaggacaagggaccttaacagcattcacgataacaacctgaaatcctacatgcagaagctcaacaatgcaaatcagcagtacgatattctgaaagcggattacgatgagctggatgcccacacaaaggagattcaggcccgtctggatgagctgaccacaggaaacaccagcgtcattgcccagtaccagggactgatttggattctccaggattacaggagcggtgatttggtggcagcggccaaggcatttgcaggagcaggctttgatttgattgaggacgaaaacatacaggctattgtggaaaatatccgtcaggatatgacggcgaatatctaccagagtctggtggaccggggacttcagctgtggaacgcaggcaataagacagaggccatggactatttccaggccagtctgaccataaggccggataatccggaagccttgttctatgtggggcgtctgtaccaggatgccggcgacacggacaatgccaattccatgtttgacaaagtggtcaatgaattcccggattccgaatatgtggaccgggcaaagaatgccaggggttattaatttaaacggtttttcaggaaagatactacagaagataagaaacatgtcttttgtggtatctttttttgtattttataggcactgagaaaggagtatggagggatggaacagacaacgtttacgtatgaggccagggagcagatgctggtgattcaccttccgggagagctggaccaccataactgcaggaacctgaaacgggatacggacctgcttttggcggagaattacatcaatcggattgtatttgattttacacacacatcatttatggattcatccggcatcggggtacttttaaaccgttataagcagatggcagccagccggggaaccgtggcctattacggggcaggaccccaggtcaggcggatactggagatgggcggtgtaagccgcctaatcaaaggatatgaagacagggaatcagcaataaagggatgaaaaagatggaggataagaagatggaaacaaacagagaacacatgaggctggaaatggagagcctttcccggaatgaggagtttgccagggtggtgaccgccgtgttcatgagcaggctggaccccaccctggaggaagtggacgatgtgaagacagccgtatccgaggcagtgaccaatgcagtcatacatggctacaggggagaccggggaaccatatatctggacctgaccgcagatatggaggaacggaccctgaccgtggcggtgaaggactgcggtgtgggtatagcggatgtgaaacaggccatggagcctatgtttaccacggatcccgagggtgagcgctccggcatgggcttttccttcatggaggcctttatggaccaggtagaggtggagtccgaaccaaatcatggcacattggtgacaatgaagaaatccatcggcaggtgacggcgatggatgagaccatgaaattaatcaatatggctcacgaaggggataaagcggcgagagaccagctggtcatggacaatgtgggacttatatggagcattgtaaggcggttctcaggccggggatatgagatggaggatctgttccagattggaagcatcggactgattaaggccattgacaaatttgacactggatttgacgtgaaattttctacctatgcagtgcccatgattacaggagaaatcaaacgatttctcagggatgacggtatgatcaaggtcagccgctccatcaaggaactgggggttaaggtcagggccgccagggaggaaatgacatacgctttgggaagggagcctaccattgaggagattgcaggccggttaggaaccagccgtgaggaagtggcggcgtccctggaagcggcggcagaggtggagtcgttataccgtccggcggacagcggggatgaaaattccacttatctcatggaccgcctggcccaggacaacaatgaccatgaggatttgttaaaccgaatggttttaaaggatttgatggagggacttgaggaagagcagagagaaatcattctgcgccgatatttttacaatgagactcagacccagattgccggcgagctgggcatttcccaggtacaggtgtcgaggctggaaaaacgtatattgaaagaaatgaggaaaaaactgtaaacaaaagtcttatggtataaaaagttccatggaagtcatactagataccagaaaccaattaacttttcttgaaaaggatgtgattcttatgggttttggtaaacgagtatgtgaactgcttgcagtcatagcctcccttctcctgataggggccctggtatggtatctgtcctcaggtttcggagacaggggatatgaaaaggaagggacgctggtatgggaggagatggacgggccttccgtggaagaggaagtatgtccggcctttgtgactgaccctgtgtccatgatgtacggacagcaggaaatccaaaggagcggaagaggtctatgaaccatacagtctatttaaaactaagtcaaatcacggagctgacccacaaggacgttgtcctaaaggacgtggcccaggtttactgcgacgaccagaatgtgatgaataaatgcaactccatgaaggtcatgaccgtgaaggtggacgccaagcggcgctatatcatgagtgccctggatgtaatcaacaagttaaaacagctggattccaccattgatgtaaacaacgtgggggagacggatttcattatagcctataaaccgccttccccgcctgcttacatctggcagtggaccaagactgtatttgtctgcctggtgtgttttttcggcgctgcatttgccattatgacctttaacaatgacgtcagcgttaccgatgtgttcagcgaggtgttcagcctggtcatgggctatgaatccggaggttttactgtgctggagattagctactcggttggtctggccgtgggcatcatcggtttcttcaatcatttcgcagccattaaactgaatacggaccccacgccgttagaggtggaaatgcgcctttatgaggacaatatcagtaagaccctgattgccaatgacggcagaaaggagtccaaaattgatattacttaaaaaatgtctgctggcgttcttcggtctgtgcgccggcggcatcattgcagccggcgtttatgcgttcttagccattatcggcgtgtttgtgcgcctcatgggaaagacaggtaccaggaagcatatttttctgtatgagacagtgattattctgggcggggtcctgggaaatatactggatatttatgagtttcccatctatatggggccctatatcggcaccctattcatatgtgtattcggactgtcggtcgggatttttgtgggctgcctggtcatgtccctggcagagacgctaaaggcccttccggtcatcagccggaggattcacctggccgtgggacttcagtatctgatatttgccctggcggcagggaaaatggcggggtccctggtatatttctggaatcatatggcctccctgggatgatgtggccaaagaggatgtccccaaagaggaggagccaaaaaggtttagggctgtccgcagccggattttgagaggagtaaacgaatggagattgataagaaaaagtatgaggagtacgtgaaacaggtgactcccacccacagcctggcaaagaacatggcggcggcctttctggtaggaggaatcatctgcgtgctgggacagtttgccctgaattttatgatgaacaacatgggtatggaccaggagacagcagcggcctggactttgctggagctgattcttttaagtatcctgctgaccggatttaatatctatccaaagattgtgaagttcgggggagcaggcgccctggtgccgataacaggatttgccaattccgtggtggcgccggccattgagtttcacgcggagggcgaggtgttcggtgttggctgtaagatatttaccattgccgggccggtgattttgtacggggttttgaccagctgggtcttggggttgttttactggggtggcagatggatggggattttttgataggcagctaggaaggattaaaattgactcggtcatttattagcaggatgatggatgaaatatttcattatcctgcttttttgatgcctgaagatgtttaacttacaaaatagcggttcgggaattaggcaagaggtaagtgtgaattttgcaggggatatagaggtagtatagaatatataatgaggaatgtggaaaatattgtgatcataatgggaatttttgcatgtttctgatataattgatactatgttgttttaagcgtctccgcggtagaggaagggaaatatttaaactatgatgataaggtggaaatgatatgggtagattgatttatgtatggtactataactttgaagggaacaggagacactgttatggagcggcattgagccaggagtatctggttaccacggatattgttaaaaatgcgcatcctgtatcggttcgtgttaaaataaataagaataaggagtatgcctgccaaaaggatttttatggtaaaaatattgattgtgtaactgccgttgtgggggaaaacggaagcgggaaaacaacctttgcgcagatgctgatgaattacgaatatccgggtattaagaaagcaaattcctttttttggatagaagtgtccgatgacggggggcttatcctatataaaaaccaaattgaagttcaaaatgtttccggaacaggctttgagtttaaattaagaaattggaatacaaatttactcagtatggtctatttgtcaaatatgtttaattttgctgagttatgcgggggcaatgaattggaggatgtaggaaggaacaattatctggcacgtcaggtctatacccctgctgcactgctgaaaaccagcagggaaaatgcaaaaaaaggtacctatggctacaaaacctttgacaatcaatattttgttccgatacagaagtatgccgaggaaatggagaggtctgacatccaggcctatatcaaaaaacaggaagagttaatcatagaagggtatatgtcctcttcggaggcaatcaaaaaggaactggatatctttcaatgctgtgaaataaagataagggaatttgccgaggatttgataatagacgctgtccgtgacaaaagccaaagctcatcccacatggcagatgcaaaggaatgttacgaaatgctgaggacaactgtcctgaaggaccagaaagaaaacttctggcttaatatctatattctctgcgtggcagaaatatatttagcattctgtggttatgatggcagacaaggaagggaaatactcgcagaaataaaagatagggcagttaatcccggttgtgaggccatttgctatctgcggacccttatttccagtatcaaggggatcgaaaaactgggatggggtattcagattaagggctgcctggatatactgaacgaatattttagtcagatgggagaacgcctgcaaagggatggagcccaggaaaattacctggacctgaaggattgggaactgggggtacaggactttgaagatattaaaaatttggttgaatggtattcgaaagaactgaaaaagcctcagtccttttttaaacggaatttacgttttgatattggacctgtttctacaggagagctggcgcttttaaatctgttttcttacatagcggatgccatggctaaaaatccccttcagaaacgatttctgattatcatagacgagatagatgcaggactgcatcccaggtggcagcagaaaatcatgaaattccttctggattggctgggaagctttgaggaataccggttccagcttatagtgacttcgcattctcccattgtattatcagatatcctgaaggaacatgtcatactgctatccggggatgcaacggtacgttctatggaaagccctacctttggggccaatatagccatgcagtttttggatgtgttctatatggataagggaaatatcggtgagtttgccaaggaaaagataggaaacctaataagcaggattgaccgttttcagaccaacgacagtgaggagaggagagaactgctctatctggccggttcagtgggggatcctgtggccagaagagagctgcagaacaggattatgaagaaaaatcctctgcatgtttcctttatggaggaatgggagcgcagcagcgatgaggagcgtagaaaagtattagaatatatgagaaaacaacataacacggaagctaagggggaccgatgatttacatagaggtaaaaaaagataaatggaaagaactggaacattatcatgcagaatacatagaagagacattaccgggaagatggaagagtttttataagaaagaagtcccaatgacagagatagacgtggtatgccagatattagaaaaccatgatatgataaaaaaagaaagtaaggagctccagattcctaatatcatcaggtggtgcacctctgaagatatccatactctggcggatgagacattggaagatctgtttgatgggctcacgtttgaaataagcgaagagaaaaaacaaaattgtgtaaaacacatccgttatattttaggataccaaaatttctccggcagctcccgcatcaagacaagagatgaccgtccatggtccagggagacatttatggatgagataggcataaaggtatgcccgtactgtaacaggcagtatattaccagctattctgtcagcccagaagggaaaaggataagaaagaccacgacggatacggaccattattatccggcgagcaagttccctttcttgtccatgaacatccacaacatggtgcccagctgtcaaatatgtaactcaagactgaaattagataaggtttcctgtaagcgtgatgctcatttatacccatatacggatccaagcagcagtctggaattccagattcctttttctgatgtcccgcagctttatgctttttcagaagaggatatccatatctgtctgaaggagtccgaaggagtgggaaagagggctgaacagtctaagaaaatatttaggctggaggaggtatatgagacccacagggatattgtgtaccggctaaaaaacgagataagagactattcccgggaagagtacaacaagatattttgcgagaactatacggatcttttcgggggatatgacagattcatagaggtgctccatccatttttggctgaggatgaaaagaatacaccattgacaaaaatgaagaaagatatttacttttacctgaaggagaattgttctgttttatattgacccatttagaaaagcttaaggccgctatttctgagtatttttccggaaacgagggatactgtaattattatatcctgtcacaggaaggagagtacatgaaatgggacagatgaaaggcaaggcaagtattgaatttgaacaccccccggtcatcataagcgctggctccgtcgttgggaaaaaagagggggagggtcctctgggaagcctgttcgatgaggtagaactggacgatatgtttggtatggataattgggaacaggcggagagcaccatgcagaagaaaaccgcggatctggtcattgaaaagggcggtatacgaaagggtgacctgcgctatctgtttgcaggcgatctgctggggcagctcatagccacatcctttggcactgtggatttggagatccctctttttgggctttacggggcctgctccaccatgggagaggcattgggattaggggcaatggcggtcaacgcaggatacgcggaccaggttatgtccatggcgtccagccattttgccactgcggaaaaacagttccgttttccgctggcctatgggaaccagcggccgccctctgccacatggactgtaacgggctgcggcgccgtggttctggccggaaacaggaaggatggtatggcccgcatcgcaggcatcacaacgggacgcatggtggacatgggcgccaaggattccatgaatatgggagcagccatggctccggcagcattccacaccattgaacagaacctggaggattttcaggtcaatgagacctggtatgataaaatcattaccggagatctgggagaggtgggaaggaccattctgctggagtttatgaagaataaaggaagggacttaagccagcttcacatggactgcgggatggagatatacgataaggaacagcaggacacccattcaggcggaagcggatgcggctgttccgctgtcaccctttgctcctacatcctccccaaggtacaggacggcacatggaagcgggttttatttgtccccacaggtgccctgctgtcctcggtcagcttcaatgaaggacagagcataccgggtattgcccatgcagtcgtcattgaacatatagacagttaaggaggaaatgacatggactatttaaaagcgtttatcgtgggaggaatcatctgcgccctggtgcagatactgctggaaaaaacaaagatgatgccggggcgggtcatggtcaccctggtggtcagcggtgccatactgggagccatagggctctatgagccctttgccaaatgggcaggggcaggggccaccgtgcctcttctgggctttggaaacaccctctggaaaggcgtaaaggagggaatcggagaggacgggcttctgggtatctttaaaggcggattaacggccagttccgcgggaatatgcggcgcattggtattcggttatctggcatcccttgtgtttaagccgaagatgaagtgatgaaaatgaatctggtaagcatgaatgaaatgaaggtaacggcggtataaagggcgtcagcagaataaagggcgtcagcagaataaagggcgtcagcagaataaagacgtcagcagaataagagcgtcagcaaaataaaaagcagcaacaaaacaacaaaaaaccggaacacacctgtcatatgacaacgtggattccggttttttcatgcctttatatccgcctgctaattctgtctgttatttctgctaatactggtttttgaaatcagttaaatctatttctagtaaggccggttccccggaccaaacccttccgtggattcctgcggggactggtatcccggaccgataggtgtcacggtaggccctgtattatcggaatcgccggtgtttggcggaataatagtggaaacgtcggagtgtatggtgcagtagcccgggatggcaaatacggaatcgtccgtggctccctcctcgccctccggcagcgtcatgcataccctggtagtcttagtggggcagtagggagtggggcgcatgcctgactccgcgcatacggtaacctccacatgcttgtcgcagacttccgtgggagcggttccctttgcaaaatattcggtatagaccgcattccctctggggtcgtggttgcagacaccggagacagctctcttgccggatttgcggcagatttccgcggtctcaatgctgtccggcaccgcaaatcccgggtctgacaagccctcatggacccggttcatgatgttgcgccagatgtccttgtggaaggtggtgcctccgttattcacgcctccgtgcttaagcttctggttgttgtcacatccgccccatatgccggcggtataataaggcgtgtagcctacgaaccatacatcgttgttggaggtggtggtgccgctcttgccggccgcagtcatgcctgtcagggcagcacgggtgctggtggagttgatggacacgcccgggcgggtgaatttgcggttgctcttcatggattcggacatggcgtccgtcaaaaggaaggcagtggaatcctttaacacctgctttgtctccggttcattgtctatgagtacctttccgttgtggtccagtatcttggtgaagaatcgtggctttgtgtaaacgccgccgttggcaatggaggcgtaggccgtggtcagctccaggttggaaacaccctttgtgatgccgcccagggcagtggctgctcccaggtcgtcctttgtaagggaggtaatgcccatgttttctgcgtactccacgcccagctgaggcgtgactgtctccataaggcagcgcacagccacaatgttcatggagtagatgatgccgtcccggatgctggagtaaccggtaaagccatagccggaattccaccagttcctgaaggttttcgttcctatggtataaggcgcgtcgtagtaaaccgtgcccagggtagcgccgcatgcgtccagggcaggggcaaaagcagtgattaccttaaaggcggagcccggctggcggtatacgttgctggcgcggtttaaggtaaggctggccgtcttttcaccgcggccgccgcacagtgccttgacctcgcctgtgtgctggtctaagagaacaaaggaagcctggggctgtaaaatcaggttctggcgctctccgatgatctcatcgccatcctttaaaagccatgccttatactggtcaatgtcgtcctggaccgcttccttggaggcgtagagtccctcaaaggaggaatctcccagcacgctcttgcggaaggtgcgcaggttttcttctgaataatgctccgtggtgccgtctgcgtgagtgatggaaagcctgtactccacagaatacttggcaacagaatagttgtccgggttattgatctcctcgtccacaatggcctgcagggccggatcctgggtggtataaatctgaagcccgccggagtaaagaagattgctggcctgactttccgtgtaatccagcttatccatcagttcattgatgacctgctcaatgagttcgtccgtaaaatagctgtaatgactgttagtccccttggcagctgtatccacgttctgtatcctgtcgtatacatcatcggccagggcttcctcctgctgggccttggtgatataaccctgctcatacatatactggagtacgattctccggcgttccgcattgttttcgcgtcctgatatgggattgagtctggagggattcttggtgatggatgcaagcacagtacactcggagagggtcaggtcggaaacgtctttgttgaaatagcgtttggccgccacctttactcccagggtgttgttgcccaggttgatggtgttgagatagttggtgataatcagcttctttgtatcttccttgctcatgcctgaatttttttccagctgaacggcaaggtactgctcctgcagttttcgctcaatcctggccccccagccggattccatacctccggagaacacattgttcttgatgagctgctgtgttatggtgcttccgccgcctgcatagtcgtcgctgacaatgccctttacggctctggcaatggaacggatgtcgatgccgttgtggctccagaaacgggaatcctcaatggctacaaatgcgttgatcaaatcctttggaagttcctcgtaggtggcttcctcacggttggagccgctggtgaccaaagtatccgtcaggtttccggcagagtcgtataccgcagtggcaaaacggctgggctgaatatttagaatatcaacggaaggggcattatctataatgcctttaaccataccgaaaccgatggatgcacccactactgccagaaataaaaacaggacaaaaagcgccttaaatatattaaggagcagccgtgaagcgtatttgcccgatttagagtggagagacttaagcctgcgctcagcctcgtactttccatagttcatagattctccttttcgtacataatctgaatgaaatccgcctccctgcggaccctcatacctatcctgtagattatacaccagttttgtaaaattgaaaaggtttaaatatgcccttgccatcgcctgctatctatattatgataaaaaataggtaaaaaatgtcgaaaggtggggatggtaacccacaaataaccgtaaaggagccgtaaaagtggtagatagttataaaattctgtacaagggaggctcaggagagctggtggagaagaagtcgcgtttcatagcggacctgcgcccggtatcctcagaggaggatgccctggattttatagaggaaatcagaaagaaatactgggatgcaaggcaccactgttttgcctatatcatcggggacagggggcagaccgcccggtgcagcgacgacggggagccgtcccagacagccggaaaacccatgatggatgtactggcaggggcggagctccacgatgtgtgtgctgttgtaacccggtatttcggaggtaccctgctgggcacagggggactggtgcgggcatattccggggctgtcaaggaaggaatgaaaaactgcgttatcctggagaaaagactggctgtccgtctgaacatcaccacggattacaacggagtgggaaagattcagtacattgcggcccagggcgggatcgacaccctggacacccagtatacggataaagccgtgttcaccttcctggttcccatggcagaggagggaagattcacggcccagattatagaagggaccgcgggaaaggctgttatccggagagagggcgaggtatactacggtcttggtgacagcggcctggtggtgttttaagaggaattgtgtttagtaaaaaaaacaggaggaatgtgataatggagatggagattaagatgaaaaagctgggatttggaaccatgaggctgcccgtgttaaatcaggaggatccggcgtcggtggacctggagcaggtctgcaagatggtggatacctttatggaaaggggatttacctattttgacactgcctacatgtaccacaaatacgagagcgagagagcggtaaaaaaggccctggtggatcgctggcccagagacagatatgttttggcggataagctgcccctcagccacctgaaagaggaggcggacatggagcggtttttccaggaacagcttgaaaagtgcggtgtttcctattttgactactacatgctccacaatatgtccagggcatattatgaaactgctgagcgtctgggggcgtttgcctttgtccgcgggaaaaaggaggagggaaaggcccgcagaatcggattttccttccatgcggatgctgagcttctggaggagattctttcaaaacaccctgagctggattttgtgcagctgcagttaaattacatagactgggacagccccaatatccagtcccgccagtgctacgaggtgtgccgcagatacggaaaggatgttattgtcatggagccggtcaagggcggaaccctggcggatgtgcccctggaggccgaaaagctgatggaggcacatgctcccggcatgacgcctgcatcctgggccgtccgttttgccgccagccgcgagggcgtcatcatggtgctgtcaggcatgtcggattacagccagcttctggacaacacagcctatatgcaggactttgttcccctgactgaggaggaggaaggcattgtggccagagcggcagaaatcatccagtccgccacagccattgcctgtacatcatgccagtactgtgtggagggatgtccgaagcagattcccataccaaagtatttctctctttataaccagtacagcctctttggggaaaaatccaattccaggggctattaccagaattatgggggcagatacgggaaagccggggactgcatcggctgccgcagatgtgaggccatatgcccccagcatctgcccattgtacagcacatgaaggaaatagcagaggtgtttgagccggccaaatagggcgccgtgacagggaaaaacagcgggaatcagcggaaatggtgtaaaataccttgcaatctcaacacaccaatgctatactataaaaccgtggctgtagacgtatataataaggaagagtaatcactatgaagatgaaaagagaagatgtaagaaatatcgctatcattgcccatgtagaccatggtaagaccacattagtagaccagctattgaggcagagcggcgtgttccgcgtaaaccaggaggtacaggagcgtgttatggactccaatgacctggagcgtgagagaggaatcaccatcctgtccaagaacacggctgtattttataaagacacaaaaatcaacatcatcgacacaccaggacacgctgatttcggcggcgaggtggagcgtgtgctcaagatggtggacggcgttgtactggtagtggacgcttatgagggccccatgccccagactaagttcgtgcttcagaaggcgctggatctgaacctgtccgtcatcgtatgtatcaacaagattgacaggcctgaggccagaccgggggatgtcatagacgagacgctggagcttatgatggatctggacgcaacggatgagcagttggactgcccctttatctacgcatctgccaggggcggattcgcaaaatacaagattgaggattcggaagtggacatgagtcccctgtttgaaaccattataaaccatatcccggcaccggagggagatccggacgcggagacccaggtgctcataagcaccattgactacaatgagttcgttggccgtatcggcatcggacgtgtggacaacgggggacttaaggtgaaccaggaatgtgttctggtaaaccatcatgagccggataagtttaagaagatcaagataggaaagctctatgagtttgacggtcttaagagagtggaggtgcaggaggcgggtattggttccatcgttgccatctccggtattgcggatatccatatcggcgataccatctgtacccctaataacccggagtctattccgttccagaagatatccgaacccaccattgccatgtatttcatggtcaatgacagcccgctggcaggccaggagggcaaatatatcacctcccgccatctgcgcgaccgcctgttcagggagctgaacacggacgtgagcctgcgggtggaggaaacggattccgcagactgcttcaaggtgtcgggccgcggtgagcttcacctgtcggttctgattgaaaatatgcgccgcgagggctttgagtttgctgtcagcaaggcagaggtactctataagtacgacgagagaaaccgcaagctggagcctatggagctggcttatgtggatgtgcctgaggaatacacaggcgttgttatccagaagctgaccagccgtaagggcgcccttcagggcatgagccaggcagccggcggttattccaggctggaattttccatcccctccagaggactcatcggttaccgcggcgactttatgacggatacaaagggaaatggtatcctgaacaccatttttgacggctactcagagtacaagggcgatctgttctaccgccagaccggctccctcattgcctttgaggcgggcgaggccattacctacggccttttcaatgcccaggaaagaggcaccctgtttatcggaccgggcgtcaaggtgtattccggcatggtagtgggccagagccctaaggcagaggacattgaaatcaatgtctgcaagacaaagaagctgaccaacacccgttcctccagcgctgacgaggcacttaagctgacaccgcctaaaatcatgagcctggagcaggcactggacttcattgatacggatgagcttctggaggtgaccccggagagcctgcgcatccgcaaaaagattctggatccaaccctgagaaaaagggcatcatttaagaacaaataaacaaaaaacgacattttgtaagcgaaatggcgaatcctgtcgaacgattctggcgggattcgccttattttttgttctattatggcatttcccctcataaactatcaatgtgccgtacaaaagcaagagaataaaaggatgaaacaagtaaaacggcagaatgagaaatattttagaagcgaagaggagatgtactatgtcagaaaaaatgattgaaaacaacagggtaagcgtcatcggagaaatcgtgtcgggatttaccttcagccatgaggtcttcggagaaggattttatatggtggatgtagctgtcaacagactcagcgagcaggcggacatcatccccctgatgatatccgagcgccttatagacgtacataaagactattcaggcagcaccgtggagtccataggccagttccgctcctacaaccggcatgagggaatcaagaacaggctgatgctgtccatctttgtaagggaaatccattttatcgaggaattcacggattacaccaagaccaatcagatattcctggacggctatatctgcaagccgcctatatacagaaagactcctcttggacgggaaatcgcagatattcttctggctgtgaaccgcccctacggcaaatccgattacataccctgcatcagctggggacgcaacgcgcgttttgcttccagcttcgaggtaggcaccagggtaagggtttggggccgtgtgcagagccgcgagtacaccaagaagctcagtgagacagagtgcgagaagcgcattgcatatgaggtctccattagcaagctggaatgtgacgaggcttgaacagaagaagcttcagacgctgtcatctaacgattccttttgaatatctttcgaaaaatgtaagaaatatttgcaatattggctaaactatgctattatgagcaagtccaattgttcttaagaaaaagcaagtaaagcatgaggtgcaagatgatgaaagagagcatgatacaggttatctgtggaccgggacgcggtaagaccaccagtgccattggaaggggattaaccgctctgaccaagggaaagtgtgtctatatggtacagttccttaagggcgccctggatgcagataacatggagatcatacagcgtctggaaccggaatttaaaattttcagatttgagaagacacctgttttctttgaccggctgacggaagaggagaaggcagaggcaagaatctgtatcctgaacggcctgaattttgccaggaaggttctggtgacaggggagtgtgatgtgcttatcctggatgagattctgggaatcctggacgagggagtgatatcaggcgatgagctgtgcgccatcatagcccaggccaggaacgcgcagatacagctgatcctcacagggaccatatatccggattgcctgaacggccatgtggatgaggtcacaaggattcagacaagatatgagtgatttcctgttgacagactgttggcagggtgataatataataccaacaatcatagagtagaggttgcgttgatcatgagtagataagccggatgtggcaggcacaggtgatggcttagggaaagggagaaacgccgaagaggaagcgttccgtgttcacgccccctctgggcatatggttaagagccgtatgactgtcatccgggtggatggagagctaccaaagaacgtggattagacactggaatcatacgtatatggaagggctgacatttacctcagcccttttttgtttccagggaaagtacgtccgggtttcattttctatggggaaaagcacactgtgattgaatcaggaaaaaaggagagaatatagtatggcactttttgaaggagcaggtgtagcactggtgaccccgtttaaggaaaacggtgaagtgaattacgaaaaactggaggagattgttgaagaacagattgcaggcggtacagacgcaattattgcctgcggtaccacaggcgaagcctccaccatgacccatgaagaacatctggatgtgattgagtacatctgcagggtgacaaagaaacggattcctgtggttgcaggaaccggctcaaactgtacggagacagctgtctatctctccgcagaggcagaaaagagaggggcggacgggcttcttctggtgtccccatattataacaaggctacccagaagggacttatggcccattttacggctgttgcggacgctgtaaagattcccgttatcctctataatataccgggcaggacaggcgtcaccattaagcctgagaccattgcggccctgtgcagggacgtggataatattgtgggtgtaaaggaggccagcggcaacttttcagccattgccactcttatgagcctgtctgacggcaaggtggatttgtactcaggcaacgatgaccagattgtgccccttctctctctgggaggcaagggtgttatctccgtgctgtccaatgtggctccacgccagacccacgacatctgcgcttcctactttgcgggggatgttaagaccagcgccgcccttcagttaaaggccattccgctgattacagagctttttagcgaggtaaaccccattcctgtaaaggcggctatgaacatgatgggcaagggagtgggacctctgcgcatgcctttgactgagatggagccccagaatcaggagaagcttaagaaggccatgacagcttacggcatcctgtagggaagattccgggaaaggacggtataccaatggtaaagatgataatgcacggctgctgcggggccatgggccatgtaattacgggactggcggcagaagacggggagatccggattgtggcaggtattgatgtgcgggagggaacggatttgggatatcctgtgttcccctccctggaccagtgcagcgtggaggcggatgtgattgtggatttcgcgtctccaaaggcagtggacgggctactggcttacagctgcaaaaagcaggttcccgtggtcctctgtaccaccgggctctcaaaggagcagcttgcagcagtggaaaaggccagccaggtgacggcaatcctgcgctccgccaacatgtccctgggagtaaacctgctgctcaaactggtaagtgacgcggccagggtactggcaggatccggctttgacatggaaatcgtggaaaagcaccacaaccagaaagtggacgcgcccagcggcacagccctggccctggcagattccatgaaccaggccatggacgggcagtatgcctatacctgtgacaggagtaccagacgggaaaagagaaatcccaaagaaatcggaatctcgtctgtcagaggaggttccattgtgggcgagcacgacgtaatatttgcgggcagggacgaggtgcttaccttaagccacaccgcatattccaaggctattttcgccaaaggcgccctggaggcagccaaattcctggccggtaagaagccgggcatgtactccatgacggacgtggtggatttataacagatttttccagaaaaggcaggaagttccaccataatccattctcctaacgcacataatataggtagaaaacgaaaggagaatgctattatgaaaaaaatcagacctgcaatttttgcaatgctgctgctcatcatggttatgtctgttacggcctgcggaagcaataactccaatacacagtcctcaacaggtgccagccagaattcatcctcagcagccacatccaccagtacctcatcccaggaaacaacagggatggagacatcttccatggaaacggaaggggacggcatcattgacggacttatgaatgacgtggagaagggcgcaaatgacgttaagggcggcgtggatgatattacaggcgaatccaacacagtcaatgagagcggcaccaacaatacaacagaggccagatagtaaattgctgtcagagcctggaaatggaccctttctatgccggggacggctggagagggtccgtctgcgtaaaaaccaggagatgcctcttgaagagctccctgtaaagtattataatcagttcatggacaaacggggaaggagattgattggggtacataagcagacgtatgcgccgcctgagaaggatgcgccgcctgaaaaagatgcgccgcagggcggtaaaattctggcgggagcgctgtccgtccgtcaggcgcaggaagcgctttatcagaggagtgctgttccttctggctgcctgtaccgcggcctgggcaaaaacaggccggggcatgaaatcctgggtccgggagcaggtgccgtacatggaacggattgaggagagcggtccggtcagggctgcggaccgggatggtatgacatcggtaaagcggggatttaccattcgtctggatgaaaagaaaatccacatattccaggtggaggaagggtatgaggaccgcgggaaggccgcaggttcagggagtgattagcgggacaaaggacattcattaggaattttaatgattgccatgcttgtattcaaagacattgtgtattataatttcttctgaaatggtattcttttatagcgtcagcttataaatctatatcgcaaccatacgaatataagaaaaggacaggtggatacccatggaaaagaaagagatgctctacgaaggaaaggctaagaaggtttacacaacggaggacccggacgtgttaatcgtgtcctacaaggatgatgcaaccgcattcaacggtcttaaaaagggaaccattgttggaaagggcgccatcaacaaccgtatgaccaacttcattttcaagaagctggaggagaagggggtacctacccacctggtagaagaattaaatgacagggaaactgctgtgaagaaagtggagattgtacctttggaggtaatcatccgcaactactctgcgggcagctttgccaagaaaatgggaatggaggaaggcatcaagttcaaatgcccgaccctggaattcagctataagaacgacgacctgggtgacccgtttatcaacagctattacgcgctggcactgggacttgccacccaggaggagattgacgatatcacagaatatgcgtttaaagtaaacgaagtgctgcaggaatattttggcggactgaacattgacctgattgatttcaagattgagttcggccgctatcacggcaaggttattctggctgacgagatttctcctgatacatgccgtctctgggataaggatacccatgagaagctggacaaggacagattcagaagagacctgggcaatgtagaggatgcatacgaagaagtattccgcagactgggtatccagtaaaccggaccggaaggtttgacgcggacaaattaagatacaacgcctgggcatgattacccaggcgttcccttctttgagaagggaagctatcatcagcaccgcgttgttatcagtacagcgcggtatgaaactggcagcctgacacacagaaaggacatgacttcatgaatcagaacctgatggattttgatattggggcggataaactgcgtgaggagtgcggggttttcgggatgtatgattttgatgggaacgatgtggcccagaccatatactacgggctttttgccctgcagcaccggggacaggaaagctgcggtatagcggtgagcgacacagaagggcccaaggggaaggcggcggtccataaggggatgggcctttgcaacgaggtatttacaccggaggtgctggaaggattaaggggtaatatcggcgtaggccatgtgcggtattccacggccggcagcagcacaagggaaaatgcacagccgttggtgcttaattatgtaaaaggaatcctggggctggcccacaacggcaacctggtcaatgcgcctgagctgcgccatgagctggagtacacaggggctattttccagactaccatagactcagaggttattgcctaccacatagccagggccaggattcatacccataatgtggagagtgcagtggccgcagccatgaagaagcttaagggagcctactccctggtaattatgagtccccgcaagctgattggagcaagggatccgatggggttcaagcccctgtgtatcggcaaacgggataatgcctacatcctggcatcagagacatgtgccctggagaccattggggctgagtttgtccgggatgtggagccgggggaaatcgtgaccatcacggcggacggcatttcctccgataaggggatgtgcctgtccgacccttccggagaagccagatgtatctttgagtatatttattttgccagaccggacagtgtttttgacggagtcagcgtttataaggccaggattcaggccggccggttcctggccgcggattcaccggtggaggcagacctggtggtgggagtgcctgaatccggcaacgcggcggctctgggctatgccatggaatccgggatcccatacggaactgcttttgtgaagaattcctatgtgggaaggacttttatcaagccaaagcagagcagcagggagtctgccgtacgcatcaaactcaatgtgctgaaggaggcggtgagcggaaagagagtcatcatgatagatgattccattgtccgtggaaccaccagcgctctgattgtgaagatgctgcgggatgcgggtgccagggaggtccatgtgaggatcagtgctccgccgtttttacacccctgttattttggcacggatattccgtcggaggaccagctcattgcccatggaaggactgtggatgaagtgagggaaatcatcggggcggacaccctttcctttttaagacaggagcggctttcccaaatggcatctgaaagacctgtctgcaccgcgtgctttacaggggattaccctatggagccgccttccggggacatccggggaagctatgagaaataggtcccgggcatttaaaaaagttattgtatatgatatgatagaaaacatgaaatcaacgaatacggaggatatgacatgagtgatcacgacagatatgtaagccctctttccgagcgctatgccagcagggagatgcagtacatcttttcaccggatatgaagttttgtacctggagaaagctctggattgcgctggctgagacagagaaggagctggggctttccatcacggacgagcagatagaggaactgaaggcccattcagaggatatcaattatgatgtggctaaggccagggagaaggaagtccgccacgatgtcatgagccatgtctatgcctacggtgtacagtgccctaaggcaaagggaatcattcatctgggtgctacctcctgttacgtgggagataatacggatattatcatcatgactgaggccctgaagctggtgaggaagaaactgctcaacgtactggcggagctgtccgggttcgctgaaaaatacaaggatctgcccacgcttgcgttcacccacttccagccggcacagccaaccacggtgggtaaacgcgccactttgtggatgatggagcttaagctggacctggatgacctggattaccttatcggttccatgcgccttctgggttccaagggaaccaccggcacccaggccagcttcctggagctttttgacggagaccatgagaaatgccgccgtctggatgcaaggattgcagagaagatgggatttgagggctgctatcctgtatccggccagacgtattcccggaaggtggacagccgtgtcataagcgtcctggcagggattgcccagagcgcccacaagttttccaatgacatccgtcttctccagcacctgaaggaagtggaggagccctttgagaagaagcaaatcggttcatctgccatggcatataagaggaatcccatgcgcagcgagcgcattgcctccctggccaactatgtgatgagcgatatgatgaatcccatgctggtggcgtccacccagtggtttgagagaaccctggacgactccgccaacaagagactgtctgtgccggaaggctttctggcagtggacggcatcctggacctgtatctgaacgtggtggacggcctggtggtatatcccaaggtcattgaaaagcacctgatggcggagcttccctttatggccacagagaatattatgatggacgcggtaaaggcaggaggcgaccgtcaggaactccatgagcggattcgcgagctgtccatggaggcgggaagaaacgtgaaggaaaagggcctggataacaacctcctggagctgatagcagctgaccctgcctttaatctttccctggatgaactgaaaaagaccatggatccgtcccgttatgtgggccgttcaccaaagcaggtggaggaattcctggaagaggttattaagccgcttcttgaagagaatgcgggtgaactggggttgacggcacagattaatgtctgatatataataggaacattctgtttccgcttacatatgatgtattaaaatcataataagcggggtgaggaaacgtggctctaataaataagcttgataatactgccagcgtaacatatggcggtaatcctatcaacagcaatgctgtttcaacggtattgcttctcgcgccaacgctgcttaaagcggtagacaagcttaccgccagtattggcgataccttaacttatacggttacagtgacgaatgtgggactgaacgctttgacaaatttgccgttcacggatacaattccggcgggcgccacctttgtggcaggttcatttactgtaaatggcgctgccgccacaccgacggttaccagtaatacgctgacatacactattcccaatatagcatcccttggaacagccagtatccagtttcaagttaaggttgtgggaggtaccacctgatagttatcagatactttattatattgatttggatgattttctctgcgcatatcaccggcctgttatgttcctggtctgccttttcgggtacgggagcagatgtttggtaaaatggtccggccgtgatgtattcagtgattgggtatacgtaagttcatatagaatgtttgactgctctccatagatactgcatctgtggggagcaaatttgttttaggggttgccggcgctgtttcagattcacaattcttctgttttgtgctatgatatccataacaattaattctgaacatattatctttcgataaggagtacttatggatgaatgtgaactttgaatactataaagttttttaccacgtatgcgcctgcggaagtcttacagctgccgcccaggagctgtgcatctcccagccggctgtaagccaggctgtgaggcagttggaaaaggaagccgggacaaagctgttcttccgcacttccaaaggggtgcagctgacccgggaaggggagcttctgtaccactatgtaaagcctggagtggaggagctgctggaaggcgggaagatgctggagcggatgctgaatatggatgtgggggaagtgcggattggcgccagcgatatgacgctgcagttttatcttcttccttatctggaacagttccaccgggaatatcccaagattaaagtgaatgttaccaatgcgcccaccccggaaaccatcaaaagcctggaagagggcagaattgattttggagtcgtgacctctccctttaccagcagagggactgtcagacagtttcaggtcaaggccatacgcaatgttttcatagcaggcagcagcttccgggaattggaagggcgcaagctggagtacaaggagctggaggcttttccgtgtatagcgctggaaaagaacacaagcaccagaacctttatggacgcctttctggcacagcagggaacactgcttaagcctgaatttgagctggccatcagcgatatgattgtgcagtttgccaggcgcaacatggggatcgggtgcgtcatggagggatttgcggaggatgccataatgagaggcgaggtattccggctgaaattcaaacaagagatgcctctccggcacatgtgcgtggtaacgggtgagtccagcctgatttccatgccggggcgcaggctgttagatatgatggcctgcgatcaggcggcggctgagaagccggccggcggcagatgatagaaaatgagccttcttcagaaaaagacataagcaatacttatggaaaacataataaataacgtctttacttatggtataggttgtagtaaattaggtaaggataagatacacaggaatgcgtgtccatcctttcatgaactgcaaatgagtattgaacgggagatacccgaaggaggattttagtatggttagagcaattgtaggtgctaactggggtgacgaaggaaagggtaagattacggatatgcttgccaaggagtctgacattatcatccgtttccagggcggaagtaatgcaggccataccattatcaatgattacggcaagtttgcccttcaccttcttccatccggcgtgttttaccagcataccaccagcatcatcggcaatggtgtggctctcaatatcccttatctggttcaggaaattgagtcgctggtggagcggggcgtgccaaagcccaggattctggtttcggacagggcccagattctcatgccgtaccatgtgctgtttgacacctacgaggaagcgcgtctggccggaaagtcctttggttccaccaaatcaggtatcgctcccttttattcggataaatatgccaaaattggtttccaggtcagcgagctctttgaccaggagctgctgagggaaaaggcatacagggtatgtgaactgaaaaatgtaattctggaacatctgtaccataagcctcttctggatcctgaagaaatcataaaggagcttctgagttaccgggatatggttgagccgtatgtatgtgatacctccgcttatctccatgaggccattaaggagggaaagaaaattctgttagagggccagctgggttcccttaaggacccggaccacggcatctaccccatggtaacatcctcctccacactggcggcctatggagccatcggcgcaggcattcctccttatgagattaaggatattaccactgtggttaaggcatattccagtgcggttggcgcaggagcctttgtcagtgagatatttggagacgaggcagatgagcttagaaaccggggaggcgacggcggagagtacggcgccaccacaggaaggcccagacgcgtgggctggtttgacgcagtggctaccaggtacggctgccggattcagggcaccacggaagtggcttttactgtactggatgtgctggggtatttggatgagataccggtatgcgtaggatatgagattgacggacaggtaaccagggaattccctaccacagctaagcttgagaaggccaaaccggttcttaccagactgccgggctggaagtgtgatatccgcggcatcaggaagtacggggatcttccggagaactgccgtaaatacattgagtttgtggagaaggaaatcgaggctcccatctcaatggtgtccaacggaccgggaagagacgacatcattatgcgtaaatagaataaggaaatatagaaaacaggacccttcggcagcagatgatgggtcctgttttaaaattctgtcaacggcctcctaacggactcctgattctgtcaacatcccccctacatgggaggattctcagtcagaagctggtggagaaaggcgttgatgacggccagttcttcttttgtataccctgagagcagggactccacggtgtcagaccagttctggtccagttttttgtggaattcataggccttcatgccctcgccgctgaggctcaggacgatttctctctggttcatgctggaacggtgcttttccagcaggcccagctttacaaggcgcgccacctgaagggatacggtggagatgttggagtcagtggactgggctatgagcttcaggttgcacttgggattgtcgccaatcaggtttatgatggacatttggtccacgcgaagcatcttatcggtaccgtagctgcggaagtccttgccgtactcatacatctgacggttatatttcatgatcaatgatatggtttcctggatttgattctttttttccataattcccccggttatttaatgataaaactgtactcctattagtataaggaaaaacaggaaagatttcaacctaatttccacacatattcatggcacctgaaatggcacccctcctgcatgggttacggttctaatttaacgcttatccccatataattaaaccaaatctaaactccgggatagtattgaatgaaaatattggacgaagggtactatgatttgattctcaataaaacgttggctccaaattacgcagatggtgatagtatcacttatattaaccaacgacattccttaatacatatacctgttgctaataacatctgcgctcttggcacaatgccttatcatatattccccagtctttttgaagctacgtctccaattagtttaggtacggcaggcattatatcaatacaagaaaatccttatttggatttgcggggacagggggtattggtgggtgttgtggacacgggagtagattatacacatcctgcttttcttaatccagataacacatcaagaattatttctatatgggaccaaaccattcaaaatggaccagctccggaacattttacttttggtacggagtatcgaacagatataataaacaaagcattatcctctgcaaaacctcattctatagtacctgccaccgattccaccggacatggtacgtccgttgcaagtataatcgccggcagcccaaatgatgtgtttgactttaccggtgtcgcaccgaaaacggaattagtagtagttaaattaaaagaggcgaaaagaaatattaaaaaagttttctgtgttccggacaatactgcctgttatatggaatccgacataatgcttggtgtccgatatgtatattccatttccaaagcgcttcaccgtcctatcgtaatatgccttgcgctaggcagcagtcaaggaggacatgacggaaacggcgctcttagcagttatctggattttctttctcgggttccgtgggttggagtatccatagccgcaggaaatgaaggaatatccgccagacattattttaattccactataactgcaccttatcaaaatgagtttgaactgttaatcggaaagaacgattctgaatttgcattggaaatatgggcttcatactcaagattatctatagaaattatagcaccaaatagggaaacgactcatcaaatctatccttccatgtttgattgcagaagatttcaatttgttttccatggctgtattatgctggttaataacatgatttttgaacaagatacaggggaccaattaattcttatccgttatacgaacgcccttcctggtacatggacaatcagagtgcgtaatttagaaaatgaagccttttcttttcacgcctggttaccatcgggttccatactgtcggattctacatattttattaagcctgatccagagacaaccgttacgtctccaggcaacagttatcattcattgacagttactgcctacaatcagattgataatagaatcatgcagacatcgggaagaggatacactcgaaataatcatataaaaccagatattgctgcgcctggctatcagctgccatgcgctttgccttctaaccgttatggtaaggctaacggcagcggcgccgccgccgcttttgctggcggggctatggcaataattttggaatggtctgtctcacggggaaattatacgtccattacagggaatgacatcagcagactattaatgcggggagcaaggcataatccggatattatatacccaaacaacacctgggggtatggagaactggatgtaaatagagtatttgaacaaatagcatctttataatcacaattaacatatctccaggccggcacaaaactgccggcttttcctttttggcataacttaattctcattatattatctcattatatgaatggatcatttcacgcatcaatgaacgaatctgtctggttcaggtccggcgcgggtctgatgcgacagctgccatgacgaatatatataatatgacggaatcaaggaaacaaacatccgcgcattgatataaatttgcataaaaatatgttgaaatttggcgaaaaatatagtatacttcttattgtaaacagtttaaaggttaaacagttttaatattaaaatatatacaaggggagagctgtttggccatacatcattatgaatcgcaggagggaagcatatgttagtaacatcaggattgagttttgtagcagcattattggcaattaatgcatttgtgttctggattgtaaagaagtaccctttaaagatttataagttcctgccgccggtcattattgtattcctgatcgttgtgtgctgcaatacctttggtgtatggtctttcagcaataaggccgtcagctccatgaggagcaatatcctggaatacatggttcccttcatggtattctgtatcgcagtgcagtgtgatttcaagaagatggtaaagataggtcccaagctgctggccgtattcctgtgcaccaccctgagtatctgtattggcatggtggtggtatataagtgctttgccggtcctctgggactgcagcagattccccagtccttcggcacatggaccgccagctttacgggaggcattgaaaacctgtacgcggttgccggggcagtagggctgagcgatgagaacctggccaatgtgctgctgctgattaacctgatattccgtccctggatgaccatattgattgtcatggttccctttgccgccaggtttaataagtggacaggcggaaaacccgaggaaatagatgtgattgcctcaaggcttgatgagacaaagagggaaaagcagattcctacttctctggatctgttcatgattatgggtgtgggccttgtgattgtggcgttcggcttccatatgggcgactttttaggagcgctgataccggcagtgcccgcccaggtatggctgtatcttatggtgacagccatcggcgttatcatcggcaccaccacggaattcggctatataaacggtctggagctgataggaggaacgctggctatctttgccctttccgtatcatcctccaatgtggacttaaggagctttgccaatgcaggcgtattcttcctgtccggcgtgactgtgcttctgatacatgtaatcatcatgttcctggtggcaaagcttatgaaggtggacttgtgtaccctgggaattgcaagcatcgccaatatcggcggcgtgtcgtcggcacctgtggttgcggctgcttacggtaaatcctatcagtctatctctgttatcatggcagctatcggctctatgattggaacctttgtgggcctgggcatgtgtaacctgctgcttatgatggggtagacaagagagggggcctgagggtatgatagataccatcaggcagaacgcatcctgcgggtatgcgtcccaataaatgataagtaactaagaaaggttggtaaggaaacatgtatgatttcgacaggacatttgacagacataatacggaggtgattaagtgggaccggctggaaaaagattttggccggaaggatctgattccctttggaatcgcggacatggactttgagacactgccggagatcacccgggccctgacggagagggcaaagcatccgacctatgggtatacgttcccgtcggaggggtactacgagagctttattgaatggaacagaacgcgcaatcactttgacataaagaaggaggatctgattacgattccaggcgttgtctgcgcatgttccttcattatctatgccctgacggaaaagggggacaaggtgatggtgaacacgcctgtttacgacccgtttttcaaggtgattgagcagcaggagaggactctggtgacctcatccctgaagcttgaacatggacggtacgagatagattttgaggacatggaggagaaattcaaggagggggttaagctcttcatcctttgcagcccccataacccggtgggccgtgtgtggaccatggaggagctgaccagactcaatgatttgtgcagccgctaccatgttctggtattttcggacgagatccactcggatctggtttttccgggacacaagcatattccttaccagacagtgaaccaggatgcggcggggcgcagcgtcactgccatggctcccagcaaaacctttaatattgccggtcttaagtcctctgtcctgattatcaagaatccggaactgtatagcagggtgaacaaggtggtcaccgcgtttcatgtgggagtggatctgttcggacttaaggcctttgaggtggcctaccgccatggggcagcctatgtggatgagctgaatcagtacttatatgaaaatgcgcagtttgtggcagagtatgtggcggagaacctgcctgcggcaaagacatatgtccaggatggaacctatcttatgtggctggattttacggcactgggattaagccagaaggaactcatggaaaaggtggtaggggcaggtgtggcgcccaatgacggttcccactatggaatagaaggaaatggattccttcgtatcaatatcggtacacagagagccatgctgaaggaaggccttgaacggctgaaaaccatatttggctgatgatgtgtgagcggatctgagaaaggaagtgtgacaggatgcaggggttactgaatgaggtgcaggaatacagggacaggatggtggagtggagaaggaatatacattcctgtcctgaaaccggatttcatctgccaaagacatcggccatggtggcgggagtgctggagaatctgggatttcaggtgcacaccggatttgcagaaagcgctgtcctgggaatcctggaaacaggcaggccgggaaataccatagcggtcagggcggatatggatgccctggggatgcaggatgagaaggatgtgccttaccgctctgccagggatggggtatgccatgcctgcggccacgacgtacatacagcccttttgctggggctggcatcctatctttcagagcacagggaccagattcccggcggatgcgtcaaactgattttccagcctgccgaggaaggtcctgcgcctggcggggcaaagctcatcgtggattcaggggtgttggacggcgtggacgccatattcggagcccactgccagcctcaatatccggcaggtgtgatgggatgcaggtacggaagcttttttgccagcggtgattttttcgaggtaaagcttaagggaaccgggtgccatgcggcttcgccccataaggggaaggacctgatatccattgccatggagatgattcaggccatacagaatataggttccagggaaataccgcccatgaagacagccgttatctcggtatgctctataaacgccggggtactgtccactaaaaatgtccttccctcagagctgacctttggaggaacctaccgggcccacgacggtcaggtgagggactatatagcaggcaggctggagcagattgtaagagacttaagccggatgaacggaatcacctgtgaatttgaggattcctttgcgtttccctcctttgccaatgacagagatatcacggataccatttaccaatccgcggcagaggtattgggacaggacaaggtgatgaagcgtccggagcctgagatgggatcagaggattttgcatggtataccaggaaatacaaaggcgcctttttcttcttcggagtgaagaatgaggagaagggactgactgccagtctgcataatcccagatttgatattgatgaggatgccatggttccggctttggctgtctatattaacacactgtaccatcttctggaaaggcaggatgtatgagcgcgaaagacaatgcagcagtagaaatgacagcagtggaaatgacagaagtggaaaaaacagaatcaaaaatgaagaacagatccatggtgctgtgggcaatcttaagcctttccatggccaatgccctggtaggaactggcatatcgcctgccctgggtgtcatacgccagaattttccggatgcgcccggagtgctggtgcagatgatagtgtcactgccgtccttgatggtaattgctgtggccattccctttgcatggctcagcagacgctattccgtccgcaagctctgcgctgcgggactggtcctgtttctggccggcggccttatgggcggtctggcttccgggatttataccctggtcctgaccagaatcctgattggagccggatatgggctgatgatgcccctgtcagtggggctgctgtcctatttcttcaccagggaggaacagcaccgcttaaatggcggcattgtcatctggtccagtgtctcatccatcatatgcatggtgctggccgggtacctggctgccatatcctggcgggcggtgtttctggtgtatctgtttggaataccatgtctgtggctgtgccttaagcatattcctgatgtgacggtcaccggcgccggggaagcagcgggagatgacagggcgcgccgggccagggggaatcttggcgtcatccgaaaaacgtgggtctatggggccggaacctttgtggtgtttgtaggttattttgccatactgaacaactgctcctccatcattctgtcggagggcctgatcagcggggaaaaggtggggattatcatgtccttccagactgtaagctctctggtgacagggctttacataggaaagcttaagaaactcctgggaaggtatatgagcacctacatatggctgtgctccatcggggggctgctttccctgtacgcgaagaacagtctggcattgaccatgctgggactggttctgtttggaatcgcccttgcctcggcagtgggaacctttaacgcggaggcgtgtattgcctgtgagagggatgaatccctggcggcaggctctgtcatcatgtttatgagaagcctgggacagttttcctcgcccctggtactgggattcatggcccggactgcgggcgcttcggatatacgcttcccgtatgagggcgcggccctgctgtctgttgtcatgatgggggtgttctgggtaaacgggctggtgagaagcagcctgaaaaaacaggcggcctgctgaaaccaaaattcaacccggagttatgccgtgatataaaaagctccctccatgagagacagagaaacgtgtctttcataagggagcttgttttttgcagttatacagtgatccgggttcctgccgtcacagttcatcccctgaatccgcgctgttcttatccggggaatcctgccctgcatccccgtcctcatccatgccttccgggggagcggatggtttcagcaccctggtcataagacccatggcgtacattacgatgggaatgaacaccagggagaagataaccgccatgagataattcttcggcgcgcccatgacagccagcacaatggccagaataaacagtcctgccagcaggacggcccccaagagggcaaatatacgtttcagtttcattgaacagctcctttctgcggcatcaggcctcctcggccaattcttcccagctctggtacagcttttccagctgtccggctatttcctctttttccttattcagttccataagccggggcacatcggtgtacacctcttccagggtgaggagggcgtcgatctcgctgtccctggtctccagggcgtgaatggactcctctgtttttctgagttcgttctgaatcctgcgtatacgggcctgttcttccttctgggccttccattccagcttcaggtcgtttggggaaccctgggacggccggtccggtgactgggaggaaccgggcactgtagaggtacggctgttcctggctgcaaacgctgcttccaccacatcctttttctccagataatagtcatagctgccgatatagttaatcagggactgtccggtcaagtccagaattctggtggctgtgcggttgatgaaataccggtcatgggatacatagagtacggttccggtgtaacggcacagggcgctttccaggatttccttggaggtgatgtccaggtggttggtgggctcgtcaaggagcaggaaattggcgtcggaaagcatcagcttggccagggagacccggccccgctcgccgccgcttaaatcgcggatcaacttgaacacatcatcccctgtaaagagaaaggacgccagggtgttgcggatctgggtattgttcatgctgggataggtgtcctggatttcgtcaaacagggtcttatccatatgaaggacctggtgttcctggtcgtagtagccgatgtgcaccttggagcccagacgtatctcgccggcatcggcgggcagcagctggttgatgattttaaggagagtggtcttgccggtgccgttgttgccgatgatggccacccgttccccgcgcttgatttcaaaatttacgtccgtgaacagagtctggctgtcaaaggacttgctcaggccggtaacggtaagcacatccttgccgctttccacatccggctccagccggatatccatggagtcgtcgatgtctatgggcttttccagccggtctattttatccagcatcttttcccggctctcggccctgcggatggatttttcccggttaaaggatttaagcttggcaatgactgcctcctggtgcctgatttcctgctgctgatttaagtatgcccggattctggcgtcccgaagcatggcttttttgtcgctgtaggccgtgtaattgccgctgaacacggtcccggttccattgtccagctccacgatttttgtcaccacccggtccaggaaatagcggtcatgggcaacgatgattacgctgccgctgtaggtcttaaggtatgtctccagccaggcgatggattccatatccaggtggttggtgggctcgtcaaggagcaggatgtcaggcttggtcagcagaagcttgcccagggatacacgggttttctggcccccggacagggcgttgatgggctttgaaaactcctcctcggcaaagccaaggccctttaatacgccggtgatttcactgcggcaggcataaccgccctccagctcaaactggtgggtcaggcggctgtattcctccagcatgttttccaaaccttcgccggacgcgcttttcatatccagttccagggagcggatgcgttcttccatctgaaggatggggcgcttgacatccagcagggcgtcgtggatggtgttctcgctgtccaggtcctggtgctgggccaggtagccgatggaggcccctttgctcagggccacacacccctcgtcacaggccagttccccgatgatgattttgaggagagtggacttgccggcgccgttgattccgacaatggctgccttttcatggtcctccaggtggaaggaaacctgctttaatatatgtttctctccaaatgatttgcttatattgctgcatgataaaatcatggtaaactcctttaaaaacgacatatttagctctcccaagtataatatacggagacgattttttcaagaacatatgtaaacggtttgacatttttttgacgtgtgtttataatagaactattaaggttttgacagaattgcacaatgggaaggtggatacatcatggaacgcaaggagatttcgaaggcagtcatatccaggctgccccgttattaccgttatttaggtgaattaatagaggaaggtgtggagcgcatatcctccaatgagctgagcgccagaatgaaagtgaccgcgtctcagatccgtcaggatctgaataatttcggcggattcggccagcagggctacggttataatgttaagtacctctattcagagatcgccaaaatacttgggattgacagacagcacaatgtgatcatcatcggagcaggaaacctgggacaggccattgccaactatacgaattttgagcgcaggggctttgttatcaggggaatgtttgatattaaccccaaactgatcggcctggtcatcagagggattgagattcgctccgtggatgatttggaaacgtttatcagggagaatgagattcagattgctgctctgaccatcccgaagacaaaggcgccggagattgcggaccgcctggtaaacgcgggcatcagggctatctggaattttgcccatacggatttggtggtaccggaggatgtggtggtggagaatgtgcacctgtccgagagcctgatgcgtctttcctaccgggtcagcagcatgtatgacctgcaggaggagaaaaagaacgcgttaaagtaaatgtttaggaagacagcaccatgatacttggagttggaacagatttaattgaaatcagacgcatggaaaaagcctgtaaaaaggattattttgtggtgcgcacatttacggatatggaaagccggcaagcaaaggggtccgcctctaagctggccggctcttttgctgtgaaggaagcggttgccaaggctttggggacagggtttcggaccttcatgcccatcgacgtggaggtgctcagggatgatatgggaaaaccctatgtccgcctttacagaggggcccttaagcggtttcaggagatgggaatggagcgcctggaggtgtccatcaccaatacaagggaatacgccatggcgtttgcagtgggagaaggaaggataaaggaggtacagccaaatgaggatgctggtaacgggaaaacagatgaaagccattgacgcatacaccatccgcaccataggaatcccctccctggtcctgatggagcgggcagctcttaaggtggccctggcagcggagcgcctgtgggaaaagggggatgtaatctgggcggtgtgcggcaccggcaacaacggggccgacggcgtggcggcagccagaatgcttcatctgaaaggatatccggtgcgtgtatttctggtgggaaatccggataagggaacagaggaattcaggacgcagcttaagattgcaggcaacgtgggacttttcactctgccgtggcaggagggggagaaggaagaatgcggccttctcatagacgcggtgttcggcgtgggactgagccgccctgtggaaggggattacaggcagtgtatcgaaatgcttgcgtccaagtccatccgcagcactgtggcggtggatgtgccttccggcatccatggggatacgggaactgtcatgggcatagccctgagggcggacctgacggttaccttcggatgggagaaaaccgggacagccctgtatccgggccgggagtacgcgggccgggtggaggtggctgacatcggatttcccggacaggccctggaggcggtgaaggaagcagaggggacggcggtaggagattttgccgttacctacagtgatgatgatctgaaacggatacccaggcgccctgcctattccaacaagggaacctttggaaaggtgctgattgtggcaggctctaagaatatgtgcggggccgcctacctgagcgccttatccgcatacaggacaggggcgggactggtaaaactgcttacggtggaggaaaaccgtcagattctccaggaacgcctgcctgaggccatcatagccacctacacccctgaccagctcatggagggcagggatgaattcaggaagatgatagaagcccagatggaatgggctgacgtggtggtgctgggaccgggactgggaaacggaccctatgtggaatatctggtggaggatatactgaccagcgcgtttgtgcctgtcatcattgacgccgacggcctgaatgccatagcgggtcatccatatcttacctcctactatacagagaacattatcgtgacgccccatctgggagaaatggcccggcttacaggggagggaatcgatcagattaaggagaacctggcagccacggccctggagtatgcgggccgctacggccttacctgcgtgttaaaggacgcagccactgtgactgcgggacgggacgggaacctgtacatcaactccagcggcaacagcgccatggcaaaggcaggctccggcgacgtgctcacaggcatcatagcaggtctgatagccattggcatggaggaagaggaggctgcctgtctgggtgtatatcttcacggacgggcaggggatgcggctgcctctaaaagcggcgcccacagcctgctggcttcggaactggcggatgccgtgggcagtgtgatggccatggtgtgacggtcagggtgtgcggctggggcatgacggtcagggcgtgacggctggggtgtgacagtcatggtgtgacaactgcggtgcagcatccgttccgccgcgccaaataataaaataagattgagaatgggccggaacagaggcccgtgacacaggaggcaacaacaatgaattcttacagcagagtttacgcatccattgacctggatgcggtggaatccaatatgagggcaatgaaggacagtctgcctccttccgcttccatgatcggggtggtaaagacagacgggtacggacacggggcagttccggtggccagggccattgatccttacgtaaaagggtacgcggtggccaccattgacgaggcgattatcctgcgccgccacggcatccagaagatgattctggtactgggcgtgacccatgagagccgttttgaggatctggtccggtacgatatacgccctgccatgttccggtatgaggaggccgggaaattgtctgaaacagctgtaaagaacggcgccagggcaaacatccatctggcggtggatacgggcatgagccggattggaatgacgccggatgaggcgtcggcagacgaggcggcccgtatatccaggcttcccggaatatgcattgagggtatgtttacccattttgccagggcagacgaggcggacaaggcattttatgaggcacagtataagaaatacagggaattctgtgaaatgctctgcagccgtggggtggatatcccgatccgccactgctccaacagcgccggtattgtggaggggctggactccaacggactggatatggtgcgcgccggaatctccatttacggcctgtacccatcagacgaggtggcccgggacagggtgaagctggttcctgccatggagcttaagagctttatcacatacataaagaccatcgggccgggtacggctgtgagctatgggggtacctttgtggcggaccgtcccatgcgtgtggccaccattcccgtgggatacggggacggttacctgcgcagtctctccaacaagggagcggtgcttatccggggaaaacgggcagagatccttggcaggatatgcatggaccagtttatggcagatgtcacagacatcccggaggcagaggaaggcgaccaggtgactctcattggaagggatggggaggaatgcatcacggtggaggagttagctgccttaagcggcggttttcactatgagattatctgccaaatcggcaaacgggttccaagagtctacctgcgggacgggaaggccattgggaaaaaggattactttaatgatatttacgagggctttggatatatgtaaaagcctaccaggctcaaagagaatgtctgattcatatgttattagtgtggcgtaaagccggccggatgcaccagtgtatcccggctatgtatacacaggtcaaaaatgtcaatactaaggttgaataaattgacggagtgtgaacgatgtgattatcagacgtggagatatttattatgcagatttgcggccggtggtgggttcggaacaggggggagtgcgccctgtgctgattatccagaatgacgtgggaaacaagcacagccccacggtcatatgtgcggccattacatccaggatgaacaaagccaagctgcccacccatgtggagctgcccaccaggcgctgtgccatgattaaggattcggtcattctcctggaacagctgcgcaccattgacaagcagagactgaaggagaaaatctgccacattgacgaggagcttcagcagaaggtggatgaggcccttatgattagcctggaactgcgtacataagcaggcgggggacccgtgagcgggaaccaagagcaggagcataaggcaccattgacgaaatatgagaaaaatgatatgataagcagagttatgccgtattttaggggtatagctctgttttttggcagggcccgacggttatggtgtttcatgagtatgaaaggagtctttttgtcattatggacgatggttatccacctgtcagtatcctcatattgataggatttattcttctggaggcagtgttttacggttttggttcggcaatacagaatgtgaacgaagggaagctggaagaggaggcggccggggggaataagaaggccgcgcgtctgttagagatagtgaaccgtcccgtgcggttcgtccataccatccaggtcaccacccatctgatgggtatgattataggagcggcgatccttcctgccatgattggcatggtggagcgcaggttccttttgggaaaggtactggcctgggtagatccggcccaggtgatggcggcagcgggcacgccctggtacaggaatccgtcctggtggcagtgggcagggattctggccctggtcaccatatttgtcctggtgctggttatcagcttcggcatcatcatacctaaacgtctggcggccaaggagcctgagaagtggggataccatatgcttccggtggtgctctttttcgcggggctattcctgcccctgacacgcctgattacgttgatttcttccctggtgcttaagctcttcggggtggacctggcggatgacgacggcaacgtgacagaggaagatatcatgtctatggtgaatgaaggccatgaacagggcgtcctggaagcggatgagacagagatgataaccaatatctttgagctgggagacaaggaagccgcggatatcatgacgcaccgcaccaacatgacggttctggacggcagcatgagccttaaggaggcagtggattttatcctgaatgaaggcgtgaatacccggtatcctgtatacggagaggacatagatgatatcatcggcatactccacatgcgcgatgccatgacctttgcggaaaaggaagagaacaaggacaggatggttatggacattcccggccttttaagggaagccaattttatacctgagacaaggaacatcgacacccttttcaaggagatgcagtcccgcaagattcacatggaaatcgtggtggatgagtacggacagacagcaggccttctcaccatggaggacatactggaagaaatcgtaggcaacatcatggatgaatacgatgaggaagaggatttcatacaggccatggaggatggcacttttgtcatgagcggccttacgcccttggaagatgtgatggaaaccctggatattgaactgcctgaggaggacagcgacacctacgataccctgaatggatatctggtctcacggctggaccgcatccctcaggaaggggagaacccccaggtggagttcggcggctggctctttgaagtggagcgggccggcaataagatgatagagagcgtccgggtcgtgcctgtgccagaaagcgggaaggctgcggaccgcgggaaagattcggtggaagagaaatatgatgcagttaatagagagtacgaaggagatgtttcgtgacagcagatttttaaggaaggcgctgatgattgcctgtcccgtggctctgcagggaatgctcaacacagtggtaaacctggtggataccctgatgattggcaccatgggggccaccgccatagcggcagtgggactggccaataagttcttctttgttttttcgcttctggtattcggaattgtcagcggaagcggcgtgctggcggcccagttctggggaaacggcgatttgaggagcatacggaaggtcctggggctttccatacttctggctctgacaggggccttgttcttcgttgtgccggcccttgtttccccacaatccgtcatgcgcatattcaccaccagccatgacagcgtggagctggggtcaaagtatttgaaaatagcggtattaacctacccctttctggccatgaccaatgtgtatgtggccatactcagggcggtgaacaaggtcattttccctgtcataagcagctgcatagcaatcgtgattaatatatgcctgaactatgtgctgattttcggcaagctgggtatgcctgccatgggagtgtcgggtgcggctgtggccaccctgatagcaaggataattgaaattgtgctgattctggggtatgtgtacggaaaaaggcttccggtggcctgcggccttaaggatttgtttggctggagcagactgtttgtcagccggtttttcggcacatcagcccctgtcattgccaatgagttcatgtgggggctgggcaccaccatgtattctctggcatacgggcgcatgggggacgaggcagtggcggccatcaccattgccaccaccatacaggatatactggtggtattgttccagggcctgagcgcggccactgccgttatcctgggcaatgagctgggggcaggccatctcaagcgggcggagaagtatgcggtgcatttcttcatcctccagttcattgccacggtaggcgtggcagtggtgctgattggcattcgctggcccatcatcggcctttacaacattacgcctgaggtggcccgggacgtaagcctgtgcatcctgatttttgcggcctacatgccggccaagatgttcaattatgtcaatgtggtgggtgtgctgagaagcggcggcgataccaagatgtgtctgttccttgataccagcggcgtgtggttcatcggcgtaccgctggcgtttttgggagccctggtgtggaggctgcctatctatacagtgtatgccctggttatgacggaagaggtatataaggctgttctgggatatatacggtacaggcagaagaagtggctcaggaacctggcttcagatgtgggatgaggctggcagacaggggctgggcaaaagggtctgccggccgaagaatttttcttgccatataaaaaaaatcgtgttaatatagaaaagatgtgtataaaatacggcagaaggctgtatttgaacgtataaaccatatataaaccataaaagaagaaacaggaaagggtgtttaccaatgtcaggacattcaaagtttgccaacattaaacataagaaagagcgcaacgacgctgccaagggcaaaatcttcactgtcatcggccgtgagattgcagtcgctgtaaaagagggcggggcagatccggccaataacagtaaactgagggacgtcatcgccaaggcaaaggccaacaacatgcccaatgataccattgaccgcggcatcaagaaggcggcaggcgatgccaattccgtaaactacgagacccttacatacgagggatacggccccaacggcgtagctatcatcgtagatacactgaccgacaataagaaccgtacggctgccaatgtgaggagcgcctttacaaagggcggcggcaacgtaggcacaccgggaagcgtgtcctatatgtttgacaaaaagggacagatcatcattgacaaggaagagtgcgacatggatccggatgagctgatgatgcttgctctggatgcaggagcagaggatttctccgaggaggaggacagctacgaggtcgttacggcgcctgaggatttcagcgcggtgcgcgaggcactggaggcccagagcattcccatgatgcaggcggatgtgaccatgattccccagacatgggtggagctgaccgatgaggatgatatcaagaagttaaaccgtacactggatttgctggatgaggatgacgatgtccaggctgtgtaccataactgggatgaataaacaagggcattgcccaaatggagcacggctgggttagagggttgtgctgtattggggccatggaatgggaagtcccctgcggcaggtttaccacaatctgcagcaggggattttttgtcatagaaaagcggacatgagttttttacggtactattaagctgagcaggattaccagaaccagggaacagagagagaggaatgcggtgatgaacgtccatgttttcagcgtttggccttccgtcatgttcagatatttgcagaccagccagaagccgctgtcgtttacatgggaagcagccactgaaccagcggcaatcgccaatacaaccagggctctctgcatttccgatacaggggaaatagcgagcaaagggctgacaataccggcggctgttatcatggctaccatgccgctgccctggctgactcttataaatacagcaaccagataccccaaaataataggtggaaggccgatggtctccacggattgtgctataacatctcctacgccgctgtccaaaagtatctgcttaaacacacctccggctccggttaccagaatgatcaaacccacgggcaggaatgctttagaggatatttcgtacagatcttctttgtgaaagcctctgcgcttgccgagaatgtaaaatgaaagcaatacagctatcagcaaagcaatgtaggatgtacctaagaattttgcggcctgtgtaaagaaactgtctgccaggattccctcattgaccagggcatccacgcctgtattgaccaggattaggaggatgggaactgcaatgataaggattacactggaaaaagaaggcaggttttcatcgtttgactcttcgggaatcatgtaatccggcacagggataaaaaggtgcttatcaatgtatttaattgaataaagataacccaccagtgtaaggggaatggaaataatgattccaaaaaagatgacccaccctacatttgcgtctaatgcgctgcatgttgctaccggacccggtgtgggaggcacaaatgcattggtcagacataaagaaataatcaggggaaatgcaaatgttgcgacggagcgttttgttttgtatgccactgcataaatcagaggcagcaggataatgaacccaacatcgaaaaaaacagggatcgcaataatgaatccagtgacagcaaaagcaagcggggcatgcttctcaccgaagaaacggatcatgcttttagccagggcctgagcgccgccggatgcctccagcatctggccgaacacggctcccagtcccactatgatggccactgtgccgagagtacctcccataccgttttgaatacttgccgtaatgtctgttaatggcattccggctgccacacccaccgcgatggaagcgattaagagcgcgataaacgcatggagtttgcactttaataccaggagcagcaggaaagcaattcctaaaaccacaattaaaaccataaccattttttcacccaataattcctttcttttgttttctttgcagagatgaaatatacaaaaaactgccagttttatgtaatataataaagcaaatttcatgccagatttgtaaaaccaaactattttcagaaaacacgatggatttatgttattttatgtgatttatgccgatttgttttaatatgggcaagatggatgcggaatacgatatgacacattttgtttcaactatatagctcgaataaaacgatttgttctatatctgagttctgttttagatttacaggatacagatgtgttctgcggtatatgcatgagaaagaaggaaagtgatacatatgataaaaatagcactggctgttccttacaagggttttattgagaacgcttaccagattttcagacaacataatgaattttacagagcggttgatcaggaaaactatgagatggaggaggttattgtcaccagtgaaaatgtgaaccagattaagattgaggccgacatagtactcaccagaggacttctcgctgaaatcctggctagtttgtcaaaaaatatcccggtagtggaaattacggttccggctgcggatattctgaggaccatacgcaattgcgttgagcattacggaaaacaaaaaatcggaatcatagcagccggcaacatgcttgacggcattacagagctttcggatttaagcgaggctcctatcaggacctttgttttgacacctgactggaataatgaaatgctggtgaaacgtgctgtgtcagaggggtgcaaggtgatattgggaggagtaaatacctgccgttatgctgcggagaatcatgtatcctttatgatgatccaaaccagccaggaagcgttttggaacgcgctgtccgacgtcaaacgcacctggtccattttcaggaaggaacaggagaaagcccttcgcctgcaggctttgctggacatatcacacgatggcattctgctgattgaccctgattttaagcttacagccatgaacaggaaagcgcagtctgtccttggaatagacggggagcacctgcccgttgacgccctgtcccttggaggggagcttaaggatgtactggcaggcgatgaagaatatgtgaaccgccttgtccaatatggcagcaatatgctgaatgtaagtaaaaacgttctgaaaatccaatcatccatctgcgggtatgtggtcaatgtgcaggcagtgaaagaaatccagagcatggagcatgacatccgaaaacggatctgtaaaaggggccatattgcccgctacaggtttgacgatatcacgggagagtcgccggttatgatatcgactgtggagacggcaagaagatacagccggacgtcctccaatattcttctgattggacaaagcggaacaggaaaagagatgttcgctcaaagcatccataatgacagccagcgcaggcggatgccctttgtggctgttaattgtgctgctattccggaacagcttctggaaagcgagctgttcggttatgtaccgggggcttttacaggagcacacagggacggaaaggcgggactttttgagctggcccacaaaggaaccctttttttggacgaaatcggagagatttcactgccgctgcaggcgaaactactgcgggttcttcaggagagggagattatgcgggtcgggggagattctgtcattcccgtggatatccgcatcctggcggctaccaaccagaatctggagcagctggcggctgagcgtcagtttcgggaggatttattgtaccgcctggatgtgctgcggatcaatattccctctctgaaccagcgcagggaggatatttctctgcttgcggattcctatatgaaacgcgcgtttcctgatatacggataacagatgaagcaaaagcatacttagagcagatggactggcccggtaatgtgcggcagctttttaatttttgcgaacgccttgcagtgctctgcaacggttttgcggtggatgcagaccttgtggccgctgtatccttacagggaggaatcccgctcgggacaggttcagtcctctctgatgaggaggacgaacagcgtattattactaagacccttgcatcctgccattaccataagggcaacacagccaaagctcttggcatcagccgttccacgctttggcgcaagctgcgggaatatggaatcaggacatgagacaatactaagtaatccagccggactttttctgggagaaaatccggctggatatttgtttttttcctgaggctttctgataaaaacaggaatatggtttttttatattatttccgtttagttggacaccaccagcgtcttcagcccatccgttgcgtttggggcattgaagatatacagagtgtaggatgtattggcgctcatgttggcggaggtggttgccactgaggtgttgggataggagccggttctggagatgtagagctggtaccaccccggatagaagctggtgtaaggggtcacttccctgtagcgtacattgctgaacgcagtataggaggagttctggttgccgatggatacgtcgaagggccccaggttcagcgacaggttgcaggtccgcagacagctggtgccggaaggcgcgttgcaggagatgtcggatatttccatgatgtccaggccgcttgccgtattgatgatggcaatggtcatggaggcggaggcgcgtacctgcacggtcttctggatgtacacatagccgttggctcctgacacggtgacggtctgggtgccggaggcagactggacgtagcctgttatgtccccgttccccagtccgcttgccaccatccagttgcccaggtacacgtaaaagggctggtacccggtggaagcattgaggatgcgcaccctgccgaagctggtggcggtgcagttgtagcatgggaaggtgacgccgggaatcacggtgacagaaccgctgttgccggggaaaataggccggaagataggcggaaagccgggacggttgccgctgtccacagggccgccttcacctggattgggaagaggtatgaccgggacattggcgccgttattctgattgccgccgctgtccacaggaccgccctcgcccggattgggaaggggagtaacgggaacatcggcctcccccagctctgccgtggtcaggagggtgtccggatactcattcattctgtctgtatgataggactgattgttcatagagacctcgcaaaagattgattcactatagtctattcatatggaagaaggaatgtgtatgtttttgaaaaaaagggaactgcatttttggcaggctgatgcatataataaaaggaaccagtgtatcaggagcgtgggcgtatgtcatgggaaccaaagaaaacagccgtatccgcactggggctgccccgggacgtgattctgggggatgtgcttataagctttgtgggcaggagccaggtgaatgtggaaaattacaggagcatcctgatttacacggataccctgattaagctccaggccaggaactgcaaggtggtgattcacggagcccgcttaaagattgattattatacggcggaggagatgaagataaccggccaggtcggttctttggaatttgaaacataaatcaaaggaggggcctgtttgattgaatggctgttacataattgggaaggatatgtaagactccgtcttcacggctattcaccggaacgtttcctgaatctctgcaatgccaggggtctggaggtatggggactgatatgcaaccgggacggggattatgagttttttatgactgtggaaggataccgccgggtgaagcccctggtgcgcaaggcacaggtaaggctgcacattaccggccgtttcggcctcccattttttatttacaggcacaggaagcgctggtattacggtgccggaatcatggcctttttcctggtgctttacgtcatgtccctgtttatctgggatatccagtttgagggtaattacaggtatacctacgatactctggtccgttttctggacacccaggacattgattacggcatgctaaaggccaggattaactgcgaggatctggaagcctccatgcgcacaagctttcccgagataacctgggtgtctgcccgtgtttccggcacaaggctgctcatacacatcaaggaaaacgaggtgctgtccactatccctgagaaggacgagacaccctgcgacattgtggcgtcccagcccggaatcatcacctccatggtggtgcgccagggggttgcccaggtctgtgtgggggaccaggtggaggagggacaggtactggtcagcggccgggtacccattatcggtgacaacgaggaggagatcaatgcctacatggttcacgcggatgcggatattgtggccagaaccgtcaaacaatatgagaaaacatttcctctgctgcatcaggaacgtgtccatacggggcgcaggcggagagggtggtacatgaaggccggggcctggtcctttaccttcctgaccccggtaaggggacagggggagtgggattattccatggaggaaaaacagctgaggctgttttccaatttctatcttcctgtctatataggcgccatacagggccgggaaatggctgcttatgagagaaattacagggaggatgagttaaaggagctgtcaaaagccataaattaccaatttgtcaaaaatttagaggaaaagggggtacaaattcttgaaaataatgatagaatagaaacaagtgtttctgaatgccgtctgacaggtgaactcgtcacagaggaatccattgttaagacacagccggcagcggagcctgatatgaattccggcggagagccgggagaaaaaccagaggagacaataactgctgaatgagtgtaattgagacaatgattgacattcccgcagagcatgagcggaatgtctgcggacaatttgacacctacttaaagaagatagagcgcaccctgcatgtgaccatgatagccagggacggcgaaataaaaattatcggaccagagaaaactataggccaggcaaaaagcgtgttcaacaacctgattgaactgtccaagaggggcaataccattacggaacaaaacgtggattatgccctgtccctgtcttttacggagaatgacgggcagattctggagattgacaaggatatcatatgccggaccatatccggcaagccggtaaagccaaagacgctggggcagaagcattatgtggatgctatccgcaagaagatgattgtgttcggcatcggaccggccggcacgggaaagacataccttgccatggccatggccatccaggcctttaagaacggcgaggtggggcgcattatccttaccaggccggccattgaggccggagaaaagctgggattcctgccgggcgatctccagagcaagattgacccgtatctgcgtcctctttatgacgccctgtaccagattatgggggcggaaagctatctccacaattcggagaaggggcttattgaggtggcgcccctggcctacatgagaggaagaaccctggacaacgcctacattatcctggatgaggcccagaacaccaccccggcccagatgaagatgttcctaaccagaatcggttttggttccaaggtcatcataacaggagaccagacccagaaggaccttccgggaggcgctgtttccggtctggacactgcccttaaggtgctgaaacggattgacgacatcgggttctgctacctgaccagttccgacgtggtgcgtcatccgctggtgcagaaaattgtacaggcctatgagacatatgaacaaaagaataccccgcctgcaggacggcgcaggatacgggagcggaattaatccgccaaggagaagtgagtatgaccatttcaattgaatacgaagcagaaaaggtactggatttgccctaccgggaaatcatcgaggacactgtgctggctgccctggattatgagggctgtccctatgaggcagaggtcaatgtcattcttacggacaatgacgccatacaggaaatcaaccgggagcaccgtcagattgacgctcccacggacgtgctgtcctttcctatggtggattatgagtcgccatcggattttgaccatgtggaggaggctgtggaggattacttcaatcctgaaaccggagagctgatgctgggggatattgtgatttccgtggataaggtggaggaacaggctgagaaatacggccattcccagaccagggagctggccttcctgacagcccacagcatgctccacctgtttggttacgaccatatggaggacggcgagcggctggtgatggaggaaaagcagaaagagatactggaaaccagggggtatacaagatgagaaacgggttcagatggatggcaatcggtttaacggcaggactgacggcagcagtccttttgacgggctgcgccagggaagccagcgtggaagcaaccacggttcaggagcctcctgccaccactgaggccgctgaacccgatatcatcatccggtctgacccggagacaaaaaaggaggacaccggaaacctgccggcattttatcttcctgaggaacggacagaggaaaacggtatgattcgcagctatctgaccggccagatggtggaaaccgccaagggaaaccgccggcccgcggctgtgatgatgagcaatgacaaggaagccaggccccagtacggcattaacagggcgggggtggtctatgaggcgccggtggagggaggcatgaaccggtacatggccctgatagaggattacgacggtctggaacgcattggttccgtgcgcagctgccggacctactacacctattttgccagggagtttgacgctgtctatgtacactttggacagagcacctttgccaagccttacctgaaaaatgtggaccatatcaacggtctggacgccatcggcgatctggccttttaccgcacaaaggacaagaaatcgcctcataatgcatataccagcggggacaggattacggcctccatagagaagctggggtacacccagtcttacgccccgtcctacaagggccattatctttttgccagggacggcagggaggcatccctgacagagcgtccgggagtcatggacgcaggcacggcaaagaccggatatatcatgaaccaggcatactttgtgtacgacccttcggacgggctttaccaccgttaccagtacggcggcatccatcagggggatgaagggcctgttgcggtgaaaaatgtgattttccagtactgccagaccggtcattacgccaccacggattatctggatatcaatgtacatactacggaatgcgggtattttatgactgacggcaaagcgattcctattaactgggaaaaggacggagaattcggtcccacccgttacttcgatgccaaccacgatgaagttgtgctgaatcagggaaagacatgggtctgcatcattcccaccagggactttgccaagtcggaaattatcggaaatgaggatacacagtaataaacatgaatccaaggacaagcaggaaaaaaaccaggaaacagaaagcagctaattttgtcatacagggaagcatcctggccatggccggtatcgtggtacgcattatcggcatgctttacaggatgccccttaacgacattatcggaaaacagggaaacggatattatacgtcagccttcaacgtgtataatatcctccttatattatcctcctacagcatgccggtggcagtgtcgaagatgatatctgcccggctggcaaggggggagcacagaaactgcagccgcatcttaaaagcggctcttatttatgctacggcagtgggaggcatagcggcggtggttctgtggtttggggcggatttgttcgcacaactcatcaagacgcctttcagccggtacgccttaaagaccctggcgcccaccatctggatcatggcatatctgggcgtgctcagaggatatttccaggggacgggcaccatggtgccaacggccgtatcacagattttagaacagattgtcaacgcggtggtcagcgtggtcgcagccggaattctctttggcgtgggtatgtccattaatgctgcccagggggcaaaggattattcctatgcgctgggggctgcgggcggcaccatcggcaccggggcaggagcgctcacggcttttctgttttttatatgccttaccgcatccaaagggcgggagagaaggcagatggtccgggaggatgtgtcggggaggacggagagctaccgccggatattttatgtgctcaccattaccgtgctgcccattgtcatcagcagcggcatctacaactgctccaatgtggtggacaattacctgttcggccagggcatggacaagctggggtatatggaggattccattgccacctactggggtgtgctgggacagtaccagctgctctttaatataccggtggctgtttccaacgccctttcatcctctctgataccgtccctcacaagggcggttgcaaacaggaacagaaaggagaagctggagcggattgcaacctccatccgtttttccctgctgattgccattccggcagcagtgggaatcacggtgttggctaagccggtctgcaacctgctgtttatcagtgaggacaataccatgctgatacggctctccatggctggttccctggccgtggtattctactccctgtcaactgttacaaacgccgtcctccagggcctgaaccatatggacgtgcccatacgccatgccgtcattgccctggtcattcatgtggcggtgctggaagtgttccttatggtctttaagatgggaatttacagtgtggtgtttgccaatattatatttgctcttgtgatgtgtctgttaaacggacatgccattgccaggtttgccagatacaggcaggaatataagagaacgctcatcctgcccacaatatgcgccggcttcatgggagcggccgcttatggggtatacagaggcatttacgccctgcttcctgaccagctgatgaggggcaggatgggtatggccattgtggtgttcccctcggtggcagtggccatcctggtctatgccgtgctccttgtaaggttcagggcagtggaggaggaggagcttaagggaatgccgggaggaaggagactggtccgtcttttgaaccggttccggcttctgggataagagacaaaagggcgtgtttgttgtatgtttgttgtatttatcaggaaaaatttgagaatgcatgattaaaacagaataagaaagcagatactaaccttaaagcggcgtccggcgccatgctgaccggcatggcggggcctgggccggcgaggaggttagtgcatgaagaagttattatactgctttgccctgtttgcagtcacatccattgtgtgtctcattgttgcgtatggaattacccggtatagcgtcaggcaggaacaggcagttcccaatacggtcattgagacggagacagtcaacgatgtggatgacagggccgccatgaaccaggaacaggtaaagccaatactggaaagcgtttctccggcagaagaatactatcttgtgtcggagtccggctttctcctggtattctgcagcgaccgcagcaccatctgcctctatacccatattcctgtcacggattttccggaaaaggagagggagaagctgatggaaggcatatggtttccgtccatgatggatgtataccattatttggaatcgtatacaagctgagtatacaagctgatgggatacggctatgccgcaatcgccagcctgcgcggcaggctgcggtctacgcggtggccagatgtccctttttctcgtttttctggatgaagtccaaaagatcttcatcctcagagttctttacatcgccgtttaaggcagaactgagcacatgggtaagttcgtccatataatggtgatagacttcgctggtcctgtcgtggggacggggaatgtctatggcgatatcggccagtatctttcccttttccctggacatgacgatgacacggtcgctgagatagactgcctcgtccacatcgtgggtgaccattagcgccgtggttttttttgcctgaagcatctgctccagctgtttttgcagcagctgccgcatctggaaatccactgctcccaggggttcgtctaagagcagaacctcagggtcgcaggcaagcgcgcgcagcagagccactcgctgcttcattccgcctgatatctcatggatatagtagttggcataatcctgaagctgcgccatctcaagaagttccttcagacgctgttcacgctgcgcttttggaatttttctttttttcatgggatagagaatgttctcacccaccttcagccatggaagaagagcgtagttttggaatacaaaggcgcggtcaggaccgggctttgtcacttcccggttatttacaaaaatttttccgctgtcccgcggctgaaaaccggctatgatggtaagcgtggttgtctttccgcagccggagggacccaacagggagacgaattccccgtccctgacttcaaaactgatgtctgacaaaacaacggtccgctccttggctccgcgtttgttctcaaaactcttgctcagttcctgcacagtaatagacataattatcttccttctttcttttaaatctccagaaatttaatgtggacggaatcaggaagaacccctccagcatttatatcctcagaaaattttccggtccggcttaattcccggactgttttgttataggcgtccacaaatttcctgaagggatctgtgtccaccacatcctttcgtacaaccaggacataagagatataatcctcatctgatatgggggcaatggacgtgccaggcaccaggactgctttggtgatatccataaccgcggcgtcaatctgccctgtttcaagggagtagcccagaacccttggactgatttctgagatttccgtgatctgcggataggcttccgacaccatctttgacaggtgtttccggccttggctgatgcctatgtgggatatctgctccatatccgtgatgctgtaaatcagcacatcggagttcatgatgacaggggcgtatatcatgaaccgcgtgtcctcaatcagatgggatgccatatgactgcaataaaatgcaatgtcaatttcctctgagcgtaaagcccattgtgcggtattgtttcagcagtcgttgaattcaaaggattcgactgccttttctccctggaccgtgctgccgcagtgacttaaggtttcatccatcagataaccggatatatcgtccccggcaccgatgcgaagcaggccctggtctgctccggagttatcctttggaaaaagggatatcccgagaaaacaggctgtaaggatgactgccgtacacagtaaggcttttttggttgtattcatatggatgctcctttcagcagcagttgtccatgccatcgccgaatagatcttttggctgtccatcaatgatgcggtagatggcatatccggcctgtccgtttttttctccggagataatgaactccatctctccttcgtggtctatgtttttaaattgtatgccctggttttcaatgggagccggaatgggatccgtgtaaacataaccgccgccgtcctggcccatggcggttacaaagcggaccagggagccctctttatatatgactaacagatcggatatcccgtcatccgtcacatcttcctggcaggccagataaatttctctgtcagggaattcctttttaaaggcaagcagagcctcgttgtccttttccacggcaggggcaaatgccagcctgcgcctgccggagtttttttcctctgcctgcttctgaagatatctgctggcggaaaaggcaaggaggcagacggataaaaggaggaccgtatacagtgcgatccgtttataaggagccagccttgttggttttttagtcatcactcgtctcctaaataagttcagctgtctggctgccaatttgtttttttatgatacgcaccagggccacgcatgcgtaggcgatcaggacaaagctgcagaggtatttcagccacaggggcgcggtgaaaatcagtttgttggcagcacggattgttttttgcgaggcgtcataatccagcacaggcttaaatccaggcatgagaagctggtttgtgatataccccacaatattggaaatcactgtcaccataaaaaaatacataatcatggcgcgttttccgatggtccggttgatggtcagaagttccgggatattggtggaggcgccggccattaaaaatgtaatcgcaactcctggtgcggctccgctggccacaagggccgctataaagggaatatgtcccaccgcgcacacatacatgagagcggccaccaccgtgattccaaaaagagagatgattcccggattccccagatacgtctgcacagctgactgggggaatatgttaaaaatcaggccggcaatcaacattccgcttaccgcatacttgcacacagtgaccgacagttcggtaaaggaccacttaagcccggacagcagcttgtccttaaaggagaccgcttcctcttccagaaggatggctggctggccgtcttgttccccgattccaggcaaatgaagctcgcttcctccaaatctgtttgcagccattccgataagcatgggagccacaaatccggtaattacatatataatagtaatttcttttcctaaaagcccccagcagagaatcactgcaatgggatttatcatgggggaggatgtcatgaatgccagcgtgggtcccagatatgcacctgaatagtacaggctgattcccagggggatggttccgcagctgcatatgggaatcagcatgccgaacacagtgacccagaatacaccggaaattctggacgaacagatagagctctttttcatcttttcaggactcaggaattcatgtaaagctcctgctatggcaaagcttatgaccatccagacagaggcgctgttcagcatattaagtgcggagtaacagacgtggtagataaatgcagcgaattcacttaacaagattgtattgcctcctcaaatgccgcggttatggattcacggcttaatttcttaatggccttggattcatttataaccagcatgcttttggttaccgcgccgtactttttgatataatcgaaatctttgccggttttgtatatgacgacttccagccttccttcgtattctttccttaaggattcaacgaaccctatataaacctcgcatcatgcacatgcgcaaatatattcaatacatggtttgttcatgtctgcttcctcctttttacttgtatttttttccattcgcaggaattataacataataaatggttgaaataaacacgtatagaaatatagtatggatgggcctgaaagcatagataaatgcattgtttatgggcggagaaatccataaaaatgtggtgaaggacagtacgggaagggggatttaattattctatggggaatgaaaggtaaatagagattaactattatacttctctgaaaagccatggtaaactcatatcgttatgaaaagattaccagtgaggaggtgaaaaaatggaggaaaaacataagcttaacagtcaggaaaagcaggtcagcagaatgattgtgggagtcaaaagacaggacaggagaaactggaaaaagctgtcaggggaaggctttaattactacacgcctgcggccgtggccttgatagcagtcatatggttttttggcgcccacatggcaaacaacttttttatatttcccacattagagagtgtggtttacagtgtgtttgacagccttcgggatttatatgtcctgcgcaatataggaataacaatgagacgtgtgctgacaggcgtactgtatgcctgtctgataggatttcccataggcctgttaatggggtattcccctaaactcatgaaagccatagcgccatttatcaattccctgcgccaggtgcccattatggcctgggttcccctttccattgtgtggtttggtctgggggacggccccacgatttttatgattgcgttcagcggggtatttacccttatcctgaatacaattgcgggagtacaggatatcagccgggactattaccacgcggtgaggagcatgggcgcaaacacgtgggatgtaatcagggatgtaatcatgccgggcgccttaccgggagtgattaccggcgtaagactggccatcagcgcaggatggatgtccgtcatatgagcggagttcatcgcgacgagtgccgggttcggttactgtatggtagaggcgcaaggccgtatgaggacggatgtcatgatggcgtacatgattattgcgggactgataggctttgtgattgacaaggggatgttattggttgaatcaatcctcttgaaatggaaagttgactgatactttatgattgaaggagcggacatatgaaaaagaaaagggtattttcaagtgcccttgcaatcggagtgctggtaacggcactggccggctgcaaggacagtactcagaccagtgtaaccgtttccactgattatgaccctgctgtggaggttgccaaatataaggatgtacttggcgagattccggctgcggacaaggattttgtggtggaaatgggatataacaactgtgaccacatggtggcggcacttgtgggacagggcgcgggaatttacgatgcattgggactgaaggtaaacattacaaagacaggcaaaatcgcggaggccatgtcctcaggggagatggatgtagggtatctgggaattgacagcgccattgacgcgtccaaaaacggagccccgctatatatggcggcggctaatcacctgggaggttcccggtatctggttgtgagcaatgacattactgacccggagcagcttaagggacagaaacttgccatcggaggcgagagtgttaaataccgtccggagtggcatacctgggcagaggagctgggattgtctccagacccggcagacggggaatatgaagccatttccatgggctcctctgacgcgctgatagcaatgaaggcagggcagctggcggcctttacctgctgagacccctatgcctcacaggcagagtccgaaggtatcggacatattatgtgtacaggatggggagctgatatctcctctgataaggaaacaggatggggtatgtgctgcgtatatgcaatgcagcaggatttcgccaaggaacatgaagaactggccaagagacttgttttggctcacggactggctatacagtatatgtatctccacccgtataacgcatccatgatttttgcggatacatttggaaccacgcagatcgtcggactgaggaccatgtacatgaagtgtgtaaaagaaggacgcaccattacatgggaattcagcgaggataacattaaaaaccgttttgcccagtatgataagtttaacattgacccggaacagcggacaagccttgacacactggaagagttctgtaaaccggagtgggtggaaaaggccagtctgggaagctttgaggtgtttgcccagtctattgatttggacgggaatttcccgttgggaatggagtacgaggagtggctgaaaaaggcaatggaaattgaccatatcacggacgaacagcttgcacaggatgcggcaaaggcggcggaaggccatgaagcccagctgaaggcagagcaggaagcgcgtgataaaaaggcagcggagcaggcggctgagaaagcggcagagaccactgcggcgcagagtgaccataaacattaagtgagaaacaagtacaagagaggatgcatgaatttgggacagaatattcaggcaaagttcaatgaaaagcaaaatgaggtacgcattgctatcatgaattttattattgataataagaggccatttcacatgaaacaggacgggtatgatgcgctaaagggaataaccctttccggaaggcatgaatttcaggatattttagatgtccttcactccagggacggtttttcagcggatgaggaagggaatatcaactttatttatcctgtatccgcgctacccactgcgcaccgcgtctcgcttgccggcggaagggaattctgggccatgtgtgccattgacgccataggtgccacgtttacgtttcatgaggatacgcagattcattcatcctgctgtgtatgtggaaatgatgtctgtgtgcaaatgaaaggcggggagtgtgtggaacattggcccaaaggcttatatgcgctctccttctgtctggaggaaatttctaactgggcgggttcgtgctgaaacgccatgaatttcttctgtacggagaacgagtttgaccaatatgcacgggatatggggcttgatatggaaaaggtaatcaaagcagatatcggccttgcggtaaaggaagcaaaggaaacgtttcttgtataaaaggggtgttatggggatggaaaaaagaggggtgtgcgggatgtgccacaataaatgtgatattgtggcaaccctggagcacggaaggcttgtaaaagtggaggctgattctaaatcccccaggggaagggtctgtcccaggggaaagaaatcgccggagattgtgtacagtgaaaaaaggatactgcatcctctgatccggtgcggggaaaaaggggaaggaagattccgccgcgccacatgggatgaggcccttacatgtgcctcccgtggttttttggacatcatcaggaattatggcccccaggcactggccagctattatggcgggagcggtctggaggacagcatgagggcaaacgcgggcctgtttcgcgtgttcggctcacccaatgatatggggccgggttccatttgcaatacgtcctcctgcgtatttacccccatgaccacctatggtgtgacagaggccgtgctggtaaaggatataggacacagtgaaattattttctgctggggaaaaaatccaaagacggattcaggcccgctgtctgcctatcgggcaatcctggaggcgaaagagcggggcgcgaagctggttgtcatagacccatgcagggcaggaatgggagaaatggcggatatgtgggtgccaatcataccaggatccgacggagctcttgcaatggccatgacaaagctgatcctggagaggcatctgtacgacgaaggatttgtgaagaactataccaggggatttgaggcatatgaagcatatcttaaaaccctttcggttgaccggctttcaaagtgctgcggtataccggtccggatgatagaagagcttacacgtctgttcctttcaacggaaaaaatatcccttgtttcctatacaggactggagtatcagctgagcggggtgcagaataaccgtgccatccagattctgtgggcaataacaggcaaggtggatgtggaaggcggcatttatattaacggcactggaatacccaccaggaaacctgccacaaagcaggaaatcatgcctttgggagcggaacaatatcctgtgttttatggactgaccggatgcggacagttcatggaattccccaatgcggtgcttcacgatgtaccttatccggtaagaggacttctgatccgggcggcatcgcctgccatttcctatccggaacaaaaactgtggcgccaggtatataagaagctggattttatggtggtcctggaccggttcatgactgaggatgcaaagtatgcggatgtggtgctgcctgccaccacgctgtgggaaaatgattcattttgtgaatatccgggcggtatacggctgagggaacagataatcgaaccggtaggagaagcaaaggcggatttgttcatttaccagcagctggcggaatatatgggcaggccggatgccttcccaaaaaataaggaagaactctatggacaagcctttaagggaagggagtccctgttggaacgtctgaaggagcacccggagggcattgtatttgaaaataagcggatctacaggaaatatgagacaggcggactcagatccgatggacggaagggatttcccaccccatcaggaaaatttgagatatcgtccactgtgctggaggatatggggtatacaggatatcctgtgtataaggatataagtgaggagccgggattaaaagccggatttgagtttgttatgacctgtggcaacaggagccctgtcagatacagctcctttggccccaatatagaggctctggcagctctggacccgtatcccacagcagatattgaccctttggatgcagcgaggctggaaatagaagacgggtgtgaggtggatgtggaaactgcctttgggacaaagcgtttccgggccagaatcacgcccatgcatcccggaaccatacatgtgttttcgggaggcggcagcagctatcattcagaggcgtggagagagggcaatatcaacgatgtaaacagcatggaaatcagggatgatatatccggatttcctgcgtttaaagccattccatgcagaatcagaagggcataaggcaatgttataaaagggaccggatttccgcactgggaatccggtcctttctgcgaataccaggatttgaggcggctgtttgggcggtcttttggcagtccggcgccgtaaataacaggaaacagttgaaatgtggcagaaaaacatataaaatggggtgtaaacttaagagcattaagagcaggataaggagctttggaacaatcatgagaaaacgaatcgtcatcataggaggcggggcctcgggactgactgcggctattggcggggccaggaacggggcccatgtgaccattgtggagcacatggaccgggtgggaaagaaaatcctgtccacgggcaacggcaggtgcaacctgaccaatctgcggatggaggcggactgttaccgctgcggccggaaggagtttcccatggaagttatccggggctttggggtggatgagaccctggctttttttaaaggtcttggaatagagccaaaggacagaaacggatatatttatcccaattcggaccaggcatcggctgtgttagacgtgctccgcagcgaggtggagcgactgggcgtggcggtgcttctttcgtgccgtgtggagaagatagagccggcggccggcggcggtcacgtctgttataaagtgtatacagaccagggcatactggacgcggacgcagtgattctggcagccggctccaaggcagctccgtccaccggttcagacggaagcggctatgagctggcagggagactgggacaccgggtaattaaaccccttcccgccctggtgcagctgcggtgccagggaaacctgtaccggcagatggcgggtatccgtacggaggccggggtaaagctcatggcggccggtgaactgctggcccgggacaggggagagctgcagctgacagattacggcctgtccggcatccctgtattccaggtcagccggtttgcggccagggccctggaccagggtaagagggtcacagccctggtggactttatgccgtcctgggatgacggtgaggcctttggcctgcttaaaaagcgcgcgtctcttctgggccataagacggtggaggaactgtttacaggtctgctgaacaagaagctggccctggttctcattaagctggcaggcatcaaaccgtcccagaagtccggggatctgtccccaaaacagctgaaactgcttctgggacagataaagtcctatgaagccattgtcatgtcagtgaatccctttgccaatgcccaggtgtgctgcggcggggtggacaccggtgaggtggatgccgccaccatggaatccaggcttcatgctaatctgtatctggcgggagaattgctggatgtggatggaatctgcggcggatacaacctgcagtttgcctggtccagcggtatgatagcggggacacatgcggcgggaggacattccgttgggaaacatgaggcaggcgcaaataaggcggcggcacatggggcatatgcccctgccccagacggaaagaggaacagaaaatgattcgtattaatcagttaaaaatgcccctgggacacgacagggccggccttttggagaaagctgccagggtactgcgtgttccgtcagaggagatagagaagctcactatcgtcaagcagtccgtggacgccagaaagaagccggatatatggtacagttacgtggtggacataggaatcaggcaggccggactccagaaggaggaaaagctggtgcgcaggctgaaggaccggaatgtggcggtccataaggaagcaccctaccggcttcctgagccgggtactgagtgtatggcgggccggcctgtcattatcggcaccggcccggccgggctgttctgcggccttatgctggccagaaaggggtacatgcccatacttctggaacggggggaggacgtggacgcgaggacggaccgggtggcccggttctgggaaacagggcagcttgacccgtcctccaatgtgcagttcggggaaggcggggcaggaacattttctgacggaaagcttaacacccttgtaaaggatacctttggaagaaacagggaagtgctgcgcatactgacagagttcggcggggacccgtctatcctgtatgtgaataagccccacatcggaaccgatgtattaagccgcattgtcaaatccatacggacagagattgaaaagctgggaggccaggtccttttccaaagccaggtaacggattttgtgacggagggggagccgggggaatccaggcgcataaaagcccttgttgtcaacggcagccaggttcttgaggcggagacagtggtgctggccatcggacacagcgccagggatacctttgagaccctgctggccagaggaatccccatggagccaaaggcattcgcggtgggactgagggtacagcatccccagacgctgatcaatgagagccagtacggcatgaaggaatgcggtgaattggggccggccagctacaagcttacatggaaggcttctgacgaaagaggagtctattccttctgcatgtgccccggaggctacgtggtcaatgcgtcctctgagccgggccgcctggcggtcaacggcatgagctatcatgacagggcaggggaaaatgccaacagcgccattattgtcacggtcacgccggaagatttctgcgggatggagactggagccggaacagaccagggctgcgaagcgcctggggatgccatggcaggaatccggttccagaggcgcctggaggagaccgctttctgcctgggaaagggaaacataccggtacagctctacggtgattttaaggaaggccgtgtctcagagggatttggcggtgtgaatcccgccttcaggggcgggtatgcctttgccaatctcagggagctgtttccggaaccattgtcccgggctttcatggaaggaatggaaggatttggaaccatgattcgcggctttgaccggccggatgccatcctggctggcattgagagccgtacctcgtccccggtccgcattcccagggaccagggaatggaaagccctgtaaagggaatctttccctgcggtgagggagcgggttatgcagggggaattacctcggcagccatggacggaatcaagacggcagaagagattatccgcaggtacagccccttacgtccgtcccggactgtggctaaaacatgacaggaacatttacaacatagaaattgacgtgacctgtaaattggtgtaagataaacaggaatcgtttgatgagataaaggagtatatcatggaaacccaggaacgtcagaatcttgcggataaacagaggattgtgattaaaattggctcatcttcccttacccatgctcagacaggggaagtgaacctgatgaagatagaaaagctggtgcgggttgtcagcgacctgcggggacagggaaaggacgtggtcctggtgtcctccggcgccattgcggcggggcggcaggccctgggccgtcacaggaagccggatacccttgctgagaagcaggcctttgcggctgtgggccaggccaggctcatgatgatttaccagaagctgtttgcggaatacaaccagacagctgcccaggtccttctcacaaaggacaccatggtcaatgattcttccaggtacaatgcccagaatacctttgacgagctgttaaacctgggaaccatacccattgtcaatgaaaacgatacggtatccacctcggagattccatatgtggacagcttcggtgataatgaccggctgtcagccattgtggcggctctgattggggcagacctgctcatcctgctgtctgacatagacggcctttacacagatgaccccagggagaacccggaggccggatttatcagcctggtgcctgaaattacgccggaattcctgcgtatgggcaaggatacgtcgggcagcgacgtgggtaccgggggaatgtcggccaagctggcagcggcccggattgccacggacagcggagccgatatggtcatagctaacggagaccaggtggatgtcatactggacatcatgtcgggcaaggaaaagggaaccctgttcctggcccataccaatctggattttgacctgatgcattatctgaacaatgaatactagggaaggcgcccggccgggcgccaggccctgaaagaggtgaatgtatggacgcgtcaaggattgaccgcatcaacgaactgtaccacaagtcccagtcagtggggctgacagaggaggagaaggaggaacaggcccggctgcgccaggagtacgttgcagctatacggggaagcctccgcaataacctgaacaacatatccatcaaggagccggacggctccatcacggatttgggaaagaaacatggcggaatcaaggaagtctgatgcattgtgaaggggagattatgatgacattgaatgaaataggcagccgtgccaaagaagtatcgcgtgtactgggtaccctgggctccagggagaagaatatgggactggaggaagcggccagggctttgctggaaggcgaggaggaaatcctggaggccaattctagggattatgagaaggccaggtccggcggcatgagccagggactgctggaccgtcttaagctgacgccggccagggttcaggccatggcggacggcctgctgcaggtggcctccctggaggaccctgtgggagaggtgctgtccatgaagcttcgccccaacggccttcagattgggcagaagcgtgtgcctctgggggttatcggcatgatttatgaggcccgccccaatgtgacggcagacgccttcggcctctgcttcaaatcaggaaatgcggttatcttaaagggcggaagcgacgcccttcattccaatatggccattacccggtgcctgcgcgccggactcgcaagcgccggcctgcccgaggattcggtccagctgattgaggataccagcagggataccaccagggagctgatgcgcctgaacaggtacattgacgtgctcatccccagaggaggggcgggacttataaagaccgtggtggagaacagcaccatccctgtcatagagacgggcaccggcaactgccatgtatatgtggacgcttccgcggaccagaatatggccctggacattatcttcaatgccaagacccagagaatcggcgtgtgcaatgcatgcgagtcccttctggtgcacaggagcattgcaaaggaattcctgccccttctcaggaagaagctggaggaaaagcaggtggagatccggggagacgaggacgcctgtgccattgaaccttcctttgtcagggccaccgaggaggactggggcagggagtacctggattatatcctgtccttaaagctggtggactctgtggatgaggccatccgccatatcaatacctacaatacaggtcattcggaaacaatcgtgacctctgattatttcaatgcccagacatttttaaatgaggtggacgctgcggctgtctacgtcaatgcttccacccgctttacagacggtgaggaattcggtttcggagcagaaatcggcatcagcacccagaagcttcacgccagaggccccatgggccttaaggaactgaccactaccaagtatattatttacggagatggacagattcgctgattacagctacagaggagccgggacattttacatttgttcccggctttgtcagacagaatgcaggaaaagaggaaatatatatgctcgaagaggaaaacagcaggaaaaggagcagaaaacagcaggaggaagaacccttcagctggaaaaaggagattatcagctggatacagattatcgtggcagcagtcatcatcgccctggtccttaacaactttatcatagccaacagccgtgtgccaaccggctccatggagaacaccatcatgtccaagagccgtgtcatcggttccaggctgtcctatctgaccagcgaccctgagagaggggatgtggttattttccatttcccggacgatccaacgggaaaaatctactacgtaaagcgtgtcatagggcttcccggtgagaccgtgaacgtggtggacggaaaagtctatatcaatgattcagacacgccccttgacgaaccctaccttcccgaaccaatggaaggctcctacggtccctatacagtgccggagggatgctacttcatgatgggagacaacaggaacaattccctggatgcccggttctggaagaaccagtttgtggagaaggacaagattatagccaaggtgctgtttacgtattttccaaagatagagaaagtggaataagagaaaacggagtaagagacaggatgaagataatcatatcacctgccaagaaaatgaatatcagggaagacgagctggaatgggcgaatcttccctgtttcctttccagggcagaagaactgaagagatacatacagggcctggacttagaccaggccaggaagctgtggcagtgcaatgaaaagatagccctgcttaattacggccgttttaaagagatggaccttgaaaggcgcctgaccccggccctcttatcctacgagggaatccagtatcagtacatggcgcctggggtgtttgagcagggacagtgggattatgtgcaggagcatctgcgcatcctgtccgggttttacggtatccttaagcccctggacggcatcgtgccgtaccgcctggagatgcaggcaaaggtggagcttacgtcaggtatcaaaagcctttatgactactggggaagctctatctgccgggaactggccgcggatgagacattgattgtgaatctggcctcaaaagaatacagcagggcagtggaaccctatctggaagcccatattgattatgtgacctgtgtgttcggaacccttgcagaggacggaacaggcggtcttaaggtaaaggtgaaagccaccgaggccaagatggccagaggagagatggtccggtttatggcggagcggggcgtccgggacgcggaggggcttaaggggtttgaccgtctggggtatcgctactgccaggagaaatccggggataaggaatacgtatttatcaagattagggaacaataaaacagggacctgtatgccggtgcggcgtacaggtcccttttcacagccggaatttcaggcgagaatcgcggccaggtcatgctccggtgtggagatgggatggatttcaaactgctcggtcagatattccagtatggccggagagagaaaggcgggaagggtggggccaaggtaaatgttccggatacccagatgcagcaggcttaaaaggatacagacagctttctgttcgtaccaggacagaaccagggtaaggggaaggtcattgacctggcagccgaatgcttctgccagggctgcggccacctggatggcaccgaatgcatcgttgcactgtcccatgtccagaaggcggggaatgccggccagggttccaagctccaggtcattaaagcggtatttgccgcaggccagggtcagaataagggtgtcctcaggcgcctgctttacaaagtccgtgtagtaattcctgccgggacgggctccgtcgcagcctcctaccaggaaaatgtggcgcagcttgttttgtctgactgcctgtgccacggtgcccgcagcagccagaacagcttcccgcccaaatccggtggtgaccttggtgccgccgttgattccggggatggtcacatcctccttgaagccgccaagctccagggccttttggatgaccggagagaagtctttgcggccgtcaatatggacgatgcccggataggacaccagggcggtggtaaatacccggtcagagtaagagggtttgggcggcatcaggcagttggtggtaaaaagcacaggggcgggaaggtccgaaaattctttctgctgatgctgccatgcggttccgaaattgccttttagatggctgtattttctgagctccgggtaggcgtgggcgggaagcatttcaccgtgggtgtatatgttgattccccggccctgggtctgctccagcagaagctttaagtcgtgaaggtcatggcctgaaatgacgataaagggtccctgttccacggtaaggcttacctgtgccggagccgggatgccgaaggcctggcggttggccctgtccaacagtgccatgcagtccaggtttacggcgcccagttccatgacaatggggagcagatcctgaaccgtatagctgtcataaccaacggcagacagccccttataaaaatagtccatgactcctctgtcctcatggcccagcaccatggcatggtacgcataggcggccattcctctcatgccgaaaagaatcagggatttaagggaacgtatatcctcatcctctgaccagagtctgttcatgtcaaaatcttctgtccggctgcaatctgccgtacaggatccgcacatgggggacagggaatgttttaagcgtccggcctccgcaagaagctcattcagggcgctgtcatcaaagcttacattggtaagggtggcaaacagtccccttacaatcaggcggtctgcttccggagagcggtcttttccttctgacgccccggcaaggccgatgagggctcctgtaagttcatcctgaatcctggcagtggcagctgtcttgccgcacacacctgcttttcccatacatccgctgcatcctgcggtctgttcgcattgaaaacaaaacatattgtgttccatgatatatcctcctcgtaaatatgtgtgagcaggcggtatgttctgcctgcccttgacggtatggggaaagtataatataatttcaacaacaagtaagttgttgaaacaacgataagggagaaaaatatggatattcatttgctggcaggaacaaggctgtttcagggaatcagggagcatgaaatagaggccatgcttacatgcctttcagcggaagagaggacctatgggaaggatgcttatatatacagggccggtgatgtgacaggccgtctgggggtggtgatggaaggggcggtgaacatcattaaggatgatgtgtggggaaacaggaaaatcattgagaatataggcggggggcagatattcggggagacgtatgcatgtcttaagggggaacccctgatggtggatgtgcaggcatcggaacgctccagaatcctgttcatggacgtgaaccgcatcctgaccacctgttcatccagctgtgacttccacaaccgtctgatacggagcctgatgtatgtgctggcagggaaaaacctgatgcttacgaagaaaatggatattatcacgcctaaatccctgcgggagagggtcatggtgtacctgtcccaggaatccgtaaagcaggggtgccgtaccgtcacagtgccctttaaccgccagcagatggcggactatctgtccgtggacagaagcgcgctgtcggcggagctgtccagaatgcagagggacggggtgatttcatatgagaagaaccgttttacgattcaatagatgatttggccggcgcaataaccggctcccagcaattaccacttgaaacagaacatatgttctgatatattggaaccaggaggtgaaagcagtggcggctttaaatatacccatacagatgtttggcgcctgcagcaccctgggagatatgacgcccctctggttccggtatgagaataaggagcacggaatcatcacggtgaagattgagagcattgtctcttccagggaagagaagttttgcggcatggagcatatcagctttgtgtgctgggccgtggcagagggccagagacgtcttattgagctgagataccgcatatctacccataagtggtcatttttcaggacactgtcatgagaagccaaaaagagcaggtatggtaccatgtggatgtgaacagcgcctatttaagctggacagccgcatacagggtctgtatcctgggggaggatttggatctgcgggaccttccctctgtcatcggaggaagcgaggcagaacggcatggcattgtgctggcgaaatcctcctctgccaaagggtatggaatcaggacaggggaaacactggcagaggccagatgcaaatgtccgggacttgtaatcgtacctccggactacagcctgtatgtgagctgctccagcgctcttgtggagctgcttaagaagtattttccatatgttcaccagtacagtatagatgaggcgttctgccaggtggaaggcacaatgggattatggggaacgcacacagcgtttgcgcaccagctgaaggaagaaatacgccgggagctgggttttactgtgaacatcggtgtgtcggacagcaagctgctggccaagatggcttctgaattccaaaagccggaccaggtccacaccctgtttacctgggagatagagaggaagatgtggccgctgcctgtaaacgaactgttctgggtggggccggccaccgcgagaaagctgagagcgctgggaataaggaccataggggctctggctgcctcggatttggaactgttaaaaaggcatctaaaaaaacagggggagtttatctggaattatgccaacggaagagacgtgtctccatttttgagagagcttccgcagaataaggggtacggcaattctatgaccacgccgtcagatgtgacggatcgggagacggcagaacaggtcatattatcccttacggaaaccgtgagcgccaggctgcgggctgacagcatggaagctgcctgcgtgggtatttccatcacggacagggaatttcgccatggatccggtcagaccaccctgatttcggctacagataccaccctggaaatctatgaggcggcccggagcctgtttgaccgcctgtggaatcattctcccatccgccagatgggggtccatacaagcaaggtcagcccaaaaggccattatcagtatcagctttttgacaggggactccatgataaatacgccaggctggacacggctgtggatgagataagaaaacggtatggggaggactgcgtgcagagggctgtttttgtggggaaccggattccccacatgtcgggcggcattgacaaggtgaaacggaccggagtcaccaaggccgtgcagaggcccgggccgggcagcggtgcgggagaccggaatcacggcagcggggaggaccgggttttccggtagcttctcggagagcagccctttatcttgtggaacaccttggagaagtaattggggtcggtgaagccggcccttatggctgtctcggtcatggtcagctttccctccagcacatcgggaatactcttttcaatgcggtattttagcaggtattcaaacagggattccttcatgtaacccttaaagacccggcagcactcgcttttgcagatatggatgtggcgggaaatatcatccagggtgatatcagactgatagttttcatggatgaaggagagcatctgacgaatccgttcctggttcttcctgcccgccgtatgtgccggttcccggtcagggcggcagtgaaggtataaaagcttccagaaacggaacaggtccatctggatgtccatttcataggtatcatagcgcaggctgtcaatgcgtataatatcctccagaagcccgaccgcttccccgtgccattcctgcgacaggtcgaaacagacagccggcagggcggcgttttccatcagagggtccgtataccggctggcaatccggcttccctggtagccgtacagcagtctggggtggaaggtaatggagatgtacctgcagtcgcggccgttttccatgcgcccggtgtgcatggtattggagttgccgaagagcgcctgtccggccctgggataaaagatctggtcattaatttgatataccatagtcccctctgtgatgagggtaagctcgatttccgtatgccagtgccactggaaggagctggtgtagaacctggacagggcctcatcgctgacaaggacgggaaattcataggtcccgtgctcctttagctcttcctggtgttcgttggtgatgatttggattttagcaggcatggccgcggactccttttgtgtatgttccggttttggaacgttttttaaagtatctgttctgtttaatctcaatattgtctggttatatcccatgaattataacattttagaataaaaaactcaatatattcccttttctgcgcatgattttcaaggataaatcccattgtttttttataatagaaatcagaagaaatcaaaaaaccaggaaaagaggagattgctttggagagaagatgcaggacagcaaagagccaatatctgaatcgtgtgataacctatatgagggatcatctgcaggagaatctgacactgacccgtattgcaagggaagcagggctgtcggagagctatctcaacgcggtttttaaagaatgtgtcaagtgtgcgccaatggattactacatcaacatgaagatggagcaggcctgctatcttctctgcaatacagacatgcatatataccaggtggcccagtatttgggatatgacaatcaatattatttttcacgggcatttaagaaggtactgggtgtgcctcctaagaagtacaaggaaatgccaaggataccggcagctcccatgcaggtttcctgttgagaacaggaaaatgtaataaacaaaatgcaatatatactttacatttagaacgatataatttataatatgtaatataagacgggggccgaaggaattgcgaaggaattgcaatccgaggtaatccgagcaaaaggccgaacggcccgggaaaatgctaataaaatgctgctgatgcgtttaaacgcgatgcctgtaaggagggagggatggcagtgaaaaacctgaaaatgaaagcagccagggccggtatggatttatcccaggaagaactggctgagctggtaggggtgacccgccagaccattgggatgatagaggcggggaagtacaaccctacgctgaatctttgcctggcaatctgcaaggcgcttcacaagacactggatgagctgttctgggaggaatagcaggagatatggaagtcagaggaaaaggaaggagaattctgatatgatggacgagagaacaacacaggtaagaaataaaataatgagtgagatggccatgcttatgtatctgtttgtggcggcggcatttgcggttaaggttctgctgatgggaaaaggaatccgggactgcgtggttgaatatgtcatattgattctggcccccctgtatcagtatgtcagggcaaggcagctgaagttcagcctgtaccggccgggatacggcagccagcaacatcgtgtcaggcgcaatcttgtctccgtggcagtgggcgcactggtattcatcctggttttctggagaacctcgaaaacaggaaccttggatgccaaagaggcggtcccgggggtgctgacctttgtcgtggtattcctgctcacaagagtggtgatagtaaggattgaaaagaagcgggcagacagactggaacaggaatatggggatgacggggaagagcaggaatagatatacgaaatttatattgttaattttcaagcgttagggtaaaatggaagggcatgtcagacaggccgcatgtatacagggcggccttaaaatttatatcataaggagagatatgaaccatgccatttaacaagaaaaagaataccggtaccccaaagcgggattatacaaagatgaagacaccccatacgtatgcaattatatttgctgccatattcctgtgctggctgctgacatttttagtacccgcgggaaaattcagcacccacaaggtagaatatacggattccaacggtgcggtaaagaccaagaccgtgctgatggcggacacgttccgttacagctaccgtctggaccgggaagcggtgaaggataacctgacagccatgagcggggatgaagcgctgatggaatccctgggtgttgaccccgcagagctggatgcgtttcttgaaacagattcttctgagtggacccaggaggatttggatgaactggggctgacagatgatgtgctgtacggacagtacggcgaatccatctatgataccagccagaagcttcataagacggcaaaggtgtggggcacagaggatttcggcggttttggcttcctcaactatgtgttcgagggactggtgacaggggaccgttccggctccgcagttggaatctgcgccttgattctggtggtgggaggttcctttggaatcattatgaagacaggggccattgatgcgggcatttacgccttcatcaaaaagacaaagggcttggagcgtctggccctgccgctgttatttatcctgttttccctgggaggcgccacctttggaatggcagaagagtgcattcccttttccatgattatggtgccctttgtgattgcgctgggctatgattccattgtggccatcactgttacctacgtggcgtcccaggtgggcaatgcagtttcatggatgagtcccttttctgtggcggtggcccagggcatagcgggaatcccggttctgtccggcgccggcttccgtctggccatgtgggtgattgtgactctgctttccgcaggatacatgatgatttacgctgaaaagatacgtaagaacccggcccactccgttgtctatgagagtgatgcctatttcaggggaagaatggactctgtttcggaggaggagagggaattcagtctgggccataagctgattcttctggagatgctggctgtcctggtttggattatctggggtgttacccaggaagggtattatattccggaaatcgcctcccagttctttgtgatgggatttgcggccggtgtgactgcggtcatttttaagctcaatgatatgacggtcaacggtatggcgtccgccttccagagcggtgtggctgacctggctggaaccgcggttgtggtaggtatggccaaaggaattcttctggtgctgggcggctccgatgcaaatgtggcgtccacgctgaatacgattttgtataccattggaaatgcgcttgcaggagtgccttcgtttatcggagcgctgtttatgtacctgttccagagctgtttcaatctgattgtgacctccaactccggacaggccgccctgaccatgcccatcatggctccccttgcggacctggtaggcgtcacacgtcaggtagcggtactggctttccagatgggagccggatttgtggatgcgttcacaccggtttccgccagtctgatcggcgtcctgggtgttgccaggattgactggggaaaatgggcaaaattccagattaagatgcaggcgtttttcttccttatgggaaccgttgccatagcaatcgccatagcggttaacctgcagtaagctggtattttgtcaagatatttaaaacgggatgttttgcagccatgcttgaatacccggttgacttcccaaccattttaaagtaaaattcatactgttaatcgcaattggctggaccgtgcaaaaggcccggcctgctatgcgtttcgggaaagaaagaaatatccgaacagaactatttaaatatagaagctaaattatagaagctaaggagcagataaatggaagaatccagagataccattgacaacataaaaaatgcagaaacagccataaaccaggacccccctgccgcggagccggagcgtcagcagtacttcatggagcgggcgaagggacagctggccgaactttcccgcaggctgggacgtccccttacctgctgcatcaacacctttgggtgcccgaacgtttgagtaaacaggaattagaaatctattgataaatacaaggcttttcccggaaaggaaaagttctatggaagggttaaaaattgatgttatggggcgcaaatatccgtattcggaatgtagcgcttgccacaaagtagcaaacagaaaatcagttgtagaaggcgcggatcttcgtgtaggaaccttgtattgtatccacattggatcgtcaacaaattttctttgccagaattgccttgaaaagctggctgaaatgttgaacgatttttcatgttcaggaaacggggtggcacaatggggagcgtaaattttcagatcgaaggtgaatttgtttgtgacctggcccgcgtctggttttgggacgaaggccgcgaatattcaaagtgtgaagaacttcttctttcatgccttgtgacggatcaaattaccctggaagaaaagaagaagattgtcgtcgaaatcctggaagggcgaaagaaacttgtcggcgtgaatagcttgtcacttgtggacgatggcgccagaatccggccgctgactgataaaatagaagaataccggaagaatgaaatcattcgcaaaatcgaagaagacattcagcgccggccgctggcatacctggatccgtattcatgcgatcaggatccggcagattataaaccgattagcgacaatttgaactatgacgacagaaaagagatacgggagatatacgggaaatatttaacaccgtatgaagatttaagattgtgggcctattcttcggatagttatttttatggccggcgccttcttcctggcttttggagcgcggaagaacgcccgtatctggatcaagggctttatttaatcgaacggccgcgcctggtttttgaactgatcggcggcccggtaaaggacactgacaaattgatgttattacttggggacttccttcaagcgcttgtcgataaaaagggagtgaatcaggccgccgccctggaaatcattcaccggaacaaaaaatttgccgcggcccaggaagaaaagcggcgccagattccgaagccggaagaaaaagagttgaccgaagacgaattgaacaaaaggacggatcccgatgattttctttccgaatacggcttgattgatccttccgggaattattacagttgcaagttcgccggtcatcatgcgaaggcgttccacattatcgcaaaaagagaaggcaagaatcccaacatataccccggcgatttcgacaaggcacttgacatattatattctgaaaactgggctattatcaggaatccagatccgcacggttccgtcttcttcgattttaggggagatcggcggccgacaaagaaacagattgacgccgcatttacgcatataatcaaatttaacgaaccgacacttccaggaatcgaaaagtatcttgaagattaaaaatgggcggccggctggccgccctggttatttcttccgatgttcacacgcggaaagctggccgccgcatatcggacacacttctttttcacaatcggcatgatgaaagcggccgaagctgacgccgcaagccgcacacgccgcgactttcttcccttcgtatggatccccaggatcgccgactttcacacggcgatagctttttcctttatagctgattgttcggatccgacagcttaccgtttttccgatggcataaccacacgcgcggcacttcggaagttccgccggcgccgaatacacaaattcatgttcaagcccattcacgaaccggatcttctggacgcggccgtccagggcgacgatctgatcgacaacctgatcgacaaaatcttttaatatttcattatccaggtcaaggcacatttgaatataatcaatgtgcttttttgaaactatccgctgggccacaaggaaggcggacgctttcttgatgaaggacagatccgccaggtcggagccgtcgccggattccgtgatttctgaaatttggccttcaatatcgcggatcttctttgcaagttcctttttcttttttgaaaattcttcttttgtcaaggcttcggaatcataaagatataattcggtaagccttgaaatggcgttctggcacttctcacgttctttttccaggatagaacggcgttcggcgatagaaatatcgtcttcgccttctgaaagccctaaatcgggcaaataggcgcctttccccagtccgctatatgccagagccgaaaaagtcgctttaaggcttgcttccgtcaatctggcgccgttgtattcatcgccttttagaagggccgcttccagcttttcaagggaatcaatctttttgtttttaaattccttctgaacacgcgacaggttagcaacatagttaaaaataaaagggccgatatataaatcgcttacaatctttttattctcacaatcaagcattttcgcccggcggccgcaccgataatttgaaggccggaatccgttttccctggcccggtcttttgttgctatcatgccggagccgcacacggcacaaattatttttccggcgaaaacgtgagtgtgtaccgtttcccgtatttctgacacgtcgcgtgaagttccgttttcgtccatgattctattgcaccggtcaaattgttccttgtcaatgattgccgggtgattgttttccctgatgatccattcgctttcgggcttcaaggggccgcggccggattcccggagattatagcggtacgtccctatatagaaagggttcctgattatgtcatggactaattttgaagaccacattccgccgcgcttcgattttacgtgattgttattcaagtaccgcgtcacttgcaaggccgaacgagtcttttcgtattcatcgaaaataaattgaacaatctttacttcttcgggatccggttcaggatatttcgtttcatcattccagcggaagccgatcggcatacgggcgccgttccacaatccattttccgcccggtcaagcatgatcccagtgacacgttccgatgtcatgtttctttcaagttctgcgaaaatcagaatgatcttcaacatagcttcgccgatggcggttgaagtgtcgaattgttcattcatagaaataaaagtgacgcggtgatcctttaattcctcatacatggccgcgaaatccagaaggttccttgaaattctgtcaaccttccaaacgatgatatgtgaaaattcgccggcccggacgcggttcatcatatcttgaaaatgcggccgatcggtattcttcgccgaatagccgtcgtcctcgaatatctggaaggcgtctattcccataagtttacaatattcttttagcttcttccgctggaatggaagactgtctttgtctacctggtaacgtgtagacacgcggacgtataacgccgccttctttttcgtccatagccggacgggcttatttctttttgatctcaaaatgtcccctttctccaggcagaccagaaaaaagggcgcaaaaaagaaagcccgttgatttttacggctttcaatgatataataggattgcttatttccaatatcagaagccgcttatcggttgcctggtattaaatccggttggcgtttgcagacgtcggccggatttttattttgttttcaacgtcgcggaatcactacttcaagattccctttcctgaatgtgtgcgtttcgccgttctttaatttctcataagcggccaggataaacgggacacattcgccagaaggcttttcagttaaacaaacagccgtctttgacgggcatttatcggagtattcacacatgattcattccccggcttcgacatcgccgttatctgtataaacgatataactttgaatcggcgttcctgaatataacaacttcgcgtcgtgttcttcaccttccacataatcatattccgaaaccatgagccagccgccgatcatgttgatccgcgccgtgatattccggcccaggttcacgattccgtgaatttcgtcttctgactttatatattcctgatagtatgaaaaaatatagtcctgaatttccacgtcttcggaaatgacagccagccgccagtttcccgtcacgtcattattcacattgtcataaaaaacaatatgaagatctgaaatatccttgtcgctgacgccgattatttcttcaccggttcgatgttcaacttctggcgccgccgcttcttctgattcagttccgtccgccacttccgccgccttttccggttccgatgattccgccgccgtttcttcctggactttttgttctgattcttccggcttcttttcttccggcttcataatgaaataaatgcacacggcaataattaacaataaaataatggcgatcatacttcttccctttttacttttcatagcgtcctttctatcaaccttttttcgatggcgattttataaatatgtttacatggtttatgtgtccttttaaattcttcacactggcacattcccaggttacaccagtacacggccggatcgctggcgccgcggatccgcgcaaggcccttttcttcgtcctgatactggatagaaaacgattcttcggacgcctggcgccggcgctctatttgttccggttcccgatgaacgctttcgtcccagcggtaaaacggccggacgttttctttcttcttccgttcccatttcaaatagattctgattttccaggcccacacgccgaagaaaagcgccagggccacaattaagattttcattctttccccctttctgaatagttcaggtaagattttccagtgactatataatataacttgcgcccggccctggaaaggtggcgatactatggaaaaacattatatttattatcaccgaaggaaagtcttcgcgttgtgttatgcgtcttacagaaaaatatactacaatttgaattttgaaggaaaaaccaaactatatcttttaatctggtagattgaaacacgcggtcgggcgtattttaacgcctaaccggttttcgttccttcatcgggcttctttgccggcggaaattgcttttccaggtcgccgggcgtcctgggcgcttccgctatgtagtcaatgctttcttccgaatcaatcacacgatagaagaaatcacgaaccttttcccgttgtgctggggcaagtttcaaatattcatacaccagattgaagctaaaatcgtcaaggtcaaattccttctttaattgttccatagtgccggaaggcgtttttgaaaacatttccccggcgccggttcggagccagtcttcatttgctgaaaattccgaacatatcaatttcaaaatatgttctttaatttctacgcggccgcgttccaaattattgattacgtcgccgctaactcctattcgctggccgaatacggccctggaaattccgatttcttcgcgtaaaagccgaagccgttcattcaaggtttattccccctttctgcttgatgaaaccatcatatcattatttgtttggttagtcaaccaaaaaattataaatatttttaaattagtggttgacaaaccaaaattaacttgctatacttggtatatcaaccaaacaaaagaggttgacaaaccaaaagaaagggggcctttgaatggctgacaaaatggctataaaggaagcgaatgtcacaaccgtaaatgaagcggacagaacattcattcgttccttgatgtcgctttcccctgaaaagaagattcttgtcaagggaatcttgatcggaatggatttacaggagaagccggcaaccgtcgcggcccgatagtcacgggccggacgttgaaaatacagcccaggaaaccgactgcaatcgggcggctgattttggaaataagcgcacattgaaaactgaatagtgaaaatgtaactggaaataagcaaaaaggaagaaaggaaaatgaataaaaatagttatcaaatccacgacactactatttattaccggaacaataccgtaaaggcgccgaagggcgctgattcctggcggttcaaatatccgcattttggaacgcttcaccggttgttcaatatgcttcgcgctgaaggattcacgatcgaaaacgacgccgaagtcgcaaagtgtatcagggacgattatttcataggccgccgcggtgatctggaactttacgcgcaccgttacccggccgggtttgaaatcatgttctttcagaatatcgtcatagagaaccagaacggcggaaggtatgatttcgataaatttcagaaaatgccctacatgatccgccttcggtttataaagtaccgggataagatcatcgcccttctgaaatccgttgaagacctggaagacgacacgaaacagagtccgcggcttgcggaagaatggatcaaggccagatatgcggaagaatggcaccatgaacaaacggacacaaattttcttctgtctgatctggacggccagacgcaagaaccatataacggacgcgatcgggaaggtctgacgcttcacaacggcgatataaagtatttcagggcttggaacggtcgtctttaccgcggccgcgtctatcacaatatcaataatatgtggtgggttatcgttgaccggttcacggttaaaaacgtggcgtcgtttgaattattcgacttgaagccggaagacaaccggcggcgccaggcccggccgcggatcccggaagcgtaccagaagcggcgccaggcaatcgaagacacgaagacaaaggaacttatgaacgaacttcgccggcgcggcgtgaaagtagggtgaaaatggaagatatgaataagagccaggcggaaagccaggaaccggaagttgaaaacttcatcgtcaattatagcgatggcacacaacggatcattgacaagggcttcttctgcgaaatcaaggaagaagaaaacggagaaagcgtcttgtccttcatcatggcgaattgtgccggccgcgatctggaaactattattcttggttgcgtccagttgggcgttaagctgggaatgatttaataaatcaaccaaaagaaaggaaataagcacatgaaagaacacaagtttgtaaaagaaacgccggttactatctacgacaaagacgggttcccgtctatgatgttaaaacttgaaaacacggcgccgtcgaaggaagaagcggatccgattttcattgtcaagggccaggaatacgattcagtttatctttcccgtttcgtcaattccattatggacggccacgcggtaagccttccctttatgaatccggccgtttccctggatatggacgaaatgatcgccgcttgcaaggcgaagggcgaaaagtggcacttgctgactatccgtgaatggcggtacatagttgaccgggcgatcgaagggcttcacgggaatacttctttcggaagttcccacaaagacgccagcgaacgcggaatcaaggggaattatggcctgacgctgaccggttccggcccggcgtcctggttccataatggcgataaggaaaccgggatcgccgatgttgtcggccttgtctggaagaccgtcgccggccttcgcctgaaaaatggcgtcctggaatacatgaaggacaatgacgccgcggcgcctgacgctgatttgtcggcggatagcaaggaatttttacagattatgattgacggccttccggtaagaatcggatccgacggcgacggtttgaagattaccacggacgaagtatcggaatatgactgggacgaaagacggaatgtcgaagttgaccttgtaaacgtgccggagattttgaaggatttagggatcgtcactgacaacatggaagaaagccgcgaatggctggccgcggatcctgaactggaagaatgtgtctgttacgtgggcgccggcttctacgacacgtcgtactctgggccttccgcgttgtctttgtactacgtccggtcggccgtgtccgcggacctcggcttcttttccgctttattgggggaacctgtgatccgataactgtaaatctgtatatccgcccgatagggcggctaataggcccaggaagggccggaaaggtggaaccatgagaaaagcaacgaaccgcacttcctacaaggaagtatgcgccttatacgaagccacggggcgcactgattaccgcttgcagacggtcaatgatattaaagtcattcacggcttcgacattctggaaacaaccggctatgaagacttgacggaagaacagaaggaaaccttcgtcgcctatgtcctgaaacacttgaacagtgtcggcatgaacacaagaattacaatgtttccgtattccgtccactatgtacgggaaatcagtcttttaagcgccgaaacatggtgcgaagaagatcaaagaaattaccgcgaagaactgggccgggaatatctgattgtgaaggcgaacggcaaaacgaaaaagtggaaaaaattcttctacgaagaaggaactgaaaacaaagttgattccaggcgcgaaacggaatttcttcgcgtcgattggaagtacggaaccggccgcgaatggttccacgtttcaaaggaattaagctattactagaaaggcggtgaagcgatggaaaagagccagaacacggccagcaaggcggagcgcctgaaagatattctgaaaggcttcggaataaagacagctaaagaccttgacgaagcgttgtccggcgccttgggcgctatgacgatcggcattatgacagaaagaccggttcagaaaaattcggcataataaaagcggcgcaacgtggaaagattggaaccctgacacgttgcgcctaaacggccacgcgcgaaaagcgccgaagcctttaataatattaagggctggaaaggaaaatgtcaataggggaatacgagaaaagacacccattttatagcgatggaataacaaaagtgacggatccgttctggcggtcggtctgtaagaaatgcggacacgtgtttcttgcttgcctggcgacttccagttgtccggtatgcggaagcaacgaagcggatcggcgcctgggcgacattcccttcgatcaagttgtggccgaacgtggttttccgattaaatccgattaaatcagagaatatcagagttaatcagagtttatcagaataaatcagagtttaacagggttagaaaggcggtgaatcttgaatcggttaggttttattattctttcgattcttcgccaggaaggagccacgaacaaactttcgtctatgacggttcgtgaaatcgcttcggcggaagaatttggaataaaagaaaacacaatatttaaaaaaataaaggactttgaacaatccggctatatatgccgcggtctgaaagagggccgcgccgccacattttacataacgccggaaggttgcgaatgtctggaaagggaaaaacaatgaaaaataaaattgcttttgtggcagtcggccaggccggcggcaacattggaagactttttgaacagaagggcttttccgtcctttacgtgaacacgtcccaggaagatcttgacacgctggatcacgcgaagttcaaacaccatatcacgggcggcgaaggttgcaataaggacagaaggaaggcgaaacagcttgtcgtcgatgatttcgacaatatcgccgcggaaatcgaatcaaagatcaaggccggcatgatttttgttatcttcgccagcggcggcggaaccggttcgggcgctgggccgatgttgtcggatctgttaatcgacgaaggaaaaacgatcggcatgattacgattcttccggcgcctgatgaaagcccgaagtcacatataaattcttacgaatgtttttcggaactgacggagatttccgggacgggcgcttgttttatccttgacaatgcgaacggggaaaagctgaacttaaattccggcttcgtggaagccttcacggcgtttcttgaaatcccgtcgaaacataagagcgtaaaggggaatatcgacaaggcagaaatcgaagaaacattgaaagcgcatggaatggccgttgtcgtgcgccagaaggcccaggacagcgccggagtgattcaggctataaaagataacgccttcgcgcccctggaagccgatcaggccgttaaatacattaccgcgtcaatggccgggaatgtaagcatggcagacattgaaaaggcaatcgggacgccgcttgacaacttccagacgttcaacgatgaagaaacgatttgttgtgtgtccgggctttcatatcctcaaacgcggcttgatgaaatctataacaaggtatctgaaaacaaggacacgatcaagaaaaatctggcggcaacacacgaaaccagaatgaaaaacgatgtgaatttcctttcggaatcagagccgccgaagaaaaagagcgaagcgccgaagcccaaaacaaggcgcgatattatgagcaaatatttgtagattggcggtgattctattgtctgaaattagctggataaaacttcggattgatatgttcgacgatgaaaaaatcaagatcattcagtccatgccggaaggcgacgcgcttcttgttatctggatccgcctgatcgccctggccggcaaatgcaacgcgaacggccttgtcctggttgaagacgaatttccgtatagcgacgaaatgttatccgttattttcgggaaaccattatcaacggttagacttgcattaaaaacctttgaaaaattccgcatggtagaaactacgcaaaagggaatctacataacgaattttgagaaacaccagaacgtcgaaggaatggatcggatccgggaacaaaaccggatccgaaaacagcgcgaacgggaacggaaaaaggcgcttcgcctggaagaatcgaaggttccgtcccttcctgattttggcggtgacggttcacgcgacgtcacacaaacgtcacgtgacacttcacgcgaagtcacggaacagagagaagataaagagatagagaaagaaataaataatatatcttctagcgaagatattgtcggcgaagcgccgccggccgcccttcctgaacagaaggcggaacgcctggtttataacctgattatggacgattataacaagacgtgcgctgatttgcctaaaatacgggctatttcagacgccaggaaaagaagcgtccgggcgcttctgaatgaacttgaaaatctgaaatttttccctggcttcacgccgtatgagaaattacaccagattttcacaatggcccaggaaagcgattttctgtccggcagaaataaaaaatgggacggttgttcgtttgattggctgatgaataaatctaacgccttgaaggtgcttgaaggaaattataaaaacaaggggggcttcgatggacacgacacaagaattacacaacctggatataacagccctgacgcggcagaggttggaaacactacgtcggacgcgcttgaacggttccggcgaaacaacggcggagccggtctataaatgcccgaaatgccgtgatactggctgggaagaagtcaagggcgaaaacgattatacttttatgcgcgaatgttcgtgtggcttgttgcaacgtcaaaaaatggatcggaaattaaagtttgcggctattccgaaggaatttcagaatcagacagtcgaaagttttatgacggattgttattctacgccgcaaaatagagaactggcgcaaatggcaaagattatcgcgaaaaggtatgtcgaacaattcgaggaaatccaggaaaccggaaaagggttgtatttttattcttccgtcaaaggttcaggaaagacgcggcttgccgtttcaatcgcaaacgatctaatacgccagaaaatgatttccgcgaagtttgcgactacgcttcaaattctggatcagataaaagcaacctggggagaaattaaaaaagccggcccggaagaaggcggatcggaacaacagcttgtcaatgacattatttccgttcccgtcctggttattgatgatataggcgccgagaatgtgaaagactgggtaaacgagagattttataatatcctgaatggccgcatgatagagaaacgcataacaatttttacttcaaattgccggattgaagacttgaaacttgacgaaagaatcgtcaatcgaattataaaaatggcattaccgatagagttcccggccgaatctatccgggtatcgcttgccagaaaggagaatagcgatcttctggatcgcttgctgggtaaataattattgcagtagattttgacggggttattatcccggccgggtgctggcccggagttggagaagtgaacacggcgttgatcgaatggctgaaagaacttcgtgaagctggaaacaaattgattttgtggacgaatcgcgttgacgaagcgctggatctggccgtttcgctttgtgcagaacacggactttatttcgacgcggtgaacgacaatcttccagaaatcacggaatacttcggttcaaatagccggaaagtgtacgcgaatgtatatatcgacgatcgcgccgtatgtatcaggcatgaaaagggggttgaagcaatcaatgaacgaatcgcaaaacaaagttattgataaaatcgaaaaactgttagcgctggccggttccgataatgagaacgaagcgaaatccgctatgatgaaggcccgtgaacttatggcaaagtatgaaatcaagcgcgaacagcttcgcgaaggccaggaggaagaacgggcgatcgttcactatacttcgccgccgttccgcgatgattggtgtaaaatgattgcttctgtaattgcggataattttagaagccgcgtgatttcaagttcgcggcgcggttccggcggcgcttaccgtctgaaatttttcggatatgatgaagacgcggaaatatgtatcaatattttcaactatgccgtgaaggttatcaggaaccgcttcgccacgttacgcgctatctatgcagacgccggccgcgaatttggaagaaatgaaaaaatgaattatgtcgagggattttgttatggcctggaaagaaattttgaagatcaaaaggcgcaaagtgaatctttcgccctggcgttgattgttccgccggccgtgtgtgaatacgttgataatattccggggcttacagaatccgccggccggaaatatgaatcaaacaaggaacacgcgcttcttcggaagactggctatattgacggaaagaattttcagaacgccggcgacaaagaaagaatcgcaaactaaaaaacgggaaggtggttgaatgaactttgataaatgcaaggaaaagtatttcgtcattgtggaaggcgaagaacgcgcgacaatccgtgaatccctggcggcggcggagaagaaaagaaaaaagctggcgaaatatagccagggaaagaagatatttattttcaaggcgacggaaagaaactgaatcccaggataagaaaatttataaaatgcttgaatccctggattttaatttcggcggcaaaacctataaagtgggcgaagccggattgatgttcgcttatgaaataggcatggagcgcggacagatatacgttatagcacttacggaaaacttcgggacaattatattctacataccggaagaagcggaagagaggataaaagggcgcgttcaggaattaccgtattcattgaatgattatttgtttttcttaattgaatttaaagattttgaaaaaacattgaaaccatataaagcatatggattgtctataaacgaagccgccgtcgagttcaaaaaaatgctgattaactgcggaatgtatgcacaggacgcggccggttcactggccgcttttgccgcggcatacggagagaagatccaggagccggcgccggttccgaataactggctgaaaatacacggcttccctatgcggagaaaagaaagggggaaaagaaaaagtgaataaatggatcggaagcggaaaagtaacggaagaaccagttatcagatataacggcgataaagcgtcctttgttgcgtttaccatgatgtgtaaacggaaccggagaataaaagaaggcgatcaaccggtggattttattgattgtgtatgcgtcggacagaacgcgaagctggcccaggaatttcttcgcaagggaaagaaagttgaagtatgcggcccgttacaatccggccactatgaaaagaacggccggaaagtttacacgaagacggtatttgtcgaagatttatcttttgcagaatcgaaggcggaagaagaagcgcgtcttctggcagagaaggccgcccagacgccggcggaatcaggatccggctttatggatattccagacgttgacgacggtttaccgtttcaatagggggggcgcggctatgaatcagaatgatataaaatacaatgcttccggctatcgtgacaaagtggcggaaacagcaatcaggaaggcagaccggacgccgccggaaataacggaacttgttgacgtgattaaaaagatttctggcgcctatggctatgacgtggaaggccggatcgcgttcaggtgtaagaaaacaaatatgatttacaagtgaggtctgaaaaatgatgaaaacaatatgtatatgtgatcgttgcaagaaagaatttccggctaaaaaggcaaaacgaattatttttgaaagttctttaccggaaaaagaaaatgccggttcaaaaatagttgatatgataatgactttgtttccccttccggtatcgcgtgactattgcccggaatgtgtttctgaaattaaagaatttatgaaaaagaaagaaggtgtaaatgatgaaaactgtattgataagcataagggcgaaatggtggaaactgattctttcggggaaaaagacggtggagatcaggaagacggcgccggcggaaattgatttccccttccgcgcgatcgtctatgttccgaaggttggaatcgtcggtctgtttgactgtgaaggaataacgcggacgaatctttatgattccctgacggaaagaagctgtctgacggctgaacagatttcaaaatatgctggcggcggtaagatttgcggctggctgattgaaaagggatcgccggtggaatttgacaatccgcttcccgttgaaacgtccggccagacgcggccgccgcaaagttggtgctatattccgaattaccgggcgaacctggtatcatatagcttcgacaatgaaacttacggttgcacgtatgtaaacacggccgaagcgctgaaagacgccgccgcggatctgaaaagctgggcgccttattatcagacagacggaaagaaaatatatgtcggaacttgtgaatttttcaagccttgcctttcggcgtgtgccttcgacgcggtggaatccgttatttgccaggcagacgacgaaggcttcggagaatgggccgacgattacttatcggacgtaacaaaagaacagtatcaggagttggaagaacagcttgacgccgtgttcaatgcgtggattgaaaagaatggccttcacgctggattctataagataaattcatatagtgaatatttgtttgacaaggcggaaggcgaatttgtgacgcctgaaatatattatagccgccgtgtgaaaaaagaattttcgggaaaggggaaagaatgaaaagccaggaagaaagaattaaggaatttatgaagggtatgtctgaaatgacagagaaaaccggcataacctacgccgtggaagctggccggaatatggtcgttttcgatgtttggaacaatgatccggttgaactggaaatcacggtcggaacggaagttgtaaagaaagacgggcggacgtcaatcacaacttttgaccggtcaaatataactgaatgaacgtcggactgattgacgttgacggacatagcaatttcccgaatttgccgctgatgaaattatcggcatggcataagaaacgcggtgacaccgttcgatggtacaatcctatttgcgacagctttccgcggccgcctttcgatcgggtttatatgtctaaagtgtttacatttacgccggatttcccgtattacataaacgcgaaggaagttataaagggcggaaccggatattcatatccagacggcggaaaaccgcttgatccagagatagagcatatatatccagattattctttgtatgggataactgatacggcatacggatttttaacgcgcggttgtccgcgaaattgtgatttctgtattgtagggaagaaagaaggattgaaaagccggaaagtcgctgatctttcggagttctggaacggacaaaagaatataatgctttgtgatccgaacctgatcgcgtgtcctgactggaaagacctgattcaacagcttattaaaagcaaggcgaaagtcaatataaatcaggggatagatattcggatcatgacagaggaaaaggcgaaaatgattaagcgccttcgcgtcgatagcgttcactttgcctgggacagatacgaagataaagaaataattattccgaagtttaagcaatttaaggaaattacagaatggggagccagaaaaacaagtgtctatgtccttacgaatttcaacactacaatagaacaagaccttgaacggatatatacacttcgggatcttgattatgatccgtatgtgatgatatacgaaaaagaaaagacacgaaacgacgatcccgttcggtatcttcaaaggtgggtgaataatagaaaaatatttaaaactattcggagatttgaagactacgatccaaaaatgggttgaaattgcatggaaagagggaagaaaaatgaatacagaagttatgttttcaagtaaaactgattcatgggccacgcctataaatttcttccgggaactggacgaagaatttcatttcaaccttgatccgtgtgctgatgaatttaatcataaatgcgatagatatttcaccgttaaagaagacggcctttcgcaaaactgggggggttcttctgttttttgcaatcccccttatggccgcgaaatagggaagtgggttgaaaaagcctatcgcacgaatcaggaacacgggaatcttgttgttatgttattaccggcccggacagatacgaaatggttccatgaatttatttatcaaaaagcggaagtccgttttgtgcgcggccgtctgaaattcggcgatagtaaaaacagtgcgccgttcccttcgatggttgtcatttacaaaaagaaagaaggtgctgacaatgggaaaagtaaaggggaagaaaaagaataagcgcccggaatacgtcgttatatgccgggagttcaaccgggacgccggcagaatcgaaatatccgttatagattcaggcgttacggatcacttattagatagtttaatcaaaatgcacttacgggatccgcacaagcggtattttctgacattgaaaaaagattatcaggtttacggcgccgtatggaagaaacagatcgaaacaatgtcaattaaaaataacaagcgaattgtcgaactggggattgaacttgaaaaagattaaaaaagtcgtattttacgaatgtccggtatgcggaaaaagttcttctgacagaaaagcgatagaaagtcattataagacacatacaatcaggtcgaaagaagtttgttattgcagtatatgcggcgaaggttggtattctaacgcctgggacgccgccagggcggcagaaatggcgcggaagtgctatcaaaaacacattgacgaaggaaatatcgacgaagtggcgacacgggctttctttctgtctggcggcgccttcggatacgtgaaaaccttcgggaaaggaaaagaagaatgaaaaagaaaaccttttattcgctgtatcagaaaagcgaagtgacgggagccgtgaaacatgaaggattccagtttgagaaaaacggaataaaactatatgtgtatcagaacagagaagggactatttttattattgatccgccgacggggttatcccttacaagtgaatgttgttccattgaagacgcgccgctatacataacagaatacagaatcgaagttctggcagaacgacggaagacggaagaatatcaaataaaatctaaaatgtttaaggcacttaagaaagccgcaaaggtgaaagaagaatgtgaaatcatgctgaaaggaataaaaaagaatgaaaaaatatgacgatcaacttttgaaatttgcaatcacaaataataaattgaaaatggaaatcaaattgtcggatctggcctggctattcagaaattcgcctgataacgtggcagacgacggagaacatgaattttgtcgcgtgaaaaagggagagaatcaggcgtttacagaagaatttgttcaaatgctgatggacgaagcgccggaaaatggaaatgatacacgctggggacatatgtttgaaaaaatatttcaggagttacgggagagtggcgcggactttctgaaatattataatgattaggggggggggggagaatatgtcttttgatttcaattcagaatggaacggaacgtcggcgtctgatattattttcgatattatgaaggctaaagaagcgatcgcggcccagcggttttttacaatgaaccggaagacaaaagaaaaagtgttcaggggttcggcagagtatgacgaaatgattgttgaaaatgaaagcgtccctgatgatctgattatttctttcaatccgtccccgtcgtgcggttccggggcgcctgaatttataaaagttatagacacggcggaaaaagattgttcttcgtttgtgagttgcgcggtgacgaataaagacagacttccggccattcagggacattcaggaaaccggaaacaacgccgcgccgaagaacgcgccaggcgccgggcaaagaaaggaagaaagcagttgacttgacaaaaaatattctgtaaaataaaagaacgaaccgcttttccagcggcccgaatcttcaacctttaataatcataccatattcgcggtatgattgcaaggggaagctggaaatatggcgaaaccggttaaaactgtcaaggaaaggaatctttttgatgaaattgacctgaaaatcatgttaatcaatgaacagatcaaaaatcatcgccgatcaatcgaaaaagcgaaacgggaatgtggctggaatgggccttccgcggtcggcggcgtcgattactcaaaagagcagtcaaaaggcgttcatattgcctttattgacggcttgcgaatgatcgaactggacgaaaggcggatccgggaactggaagaagaacgaaaagaccttcggaaaagcaaaaagcggatcaaaaggatttatgaaagcctggccggctatgaatcccaggtttactattacagaattattcggaaaatgacacaagcggccgcggctgatgaaatgtcaatttctgtaaggcaattccagaggatcgaaagcgatatgaaggaaaaggggctgatctgacgggttcaaaaatgaaaattttttaattctaaaatttttctaaaatttgaatacgcattttttcaaaaaagcctgattttatgcggctttcaggcgaatttgaatgtcgtgttttatgtcgtgtttttgtcgtgaaatatgtcgtggaaatgtcgtggaaatgtcgtgtcaatatgtgttatactagatatgctgaaaagtgtatgaagaaggacttgaaaggcgtcgccgaagggcggcgctttttgtatgccagaaagaaggaatgatgaaatgattaaaattgcagattttatctttagaaactggcggatttttgcccttgtttatgcaatcggcggaacggttgttttcattttgtcgtttgtgttcatgcgcctattggcaaaatgggccgattatgacaaagaaaattttcctgatttcgattatgactatcccccggaaggctggaagaataccgcaagagtgataattgtatcgctttttctttcggttttatgcgccgtattatggccggtgattccgcttgcatttttcggagtgctatttttgacggaaatcgcggagcgcttcccttcgcttatgggacatttagcggacgacgattcagagggggacgaaaaagggggtgtgcctgatgaatacagtcgagccgatccgggacatggatcttgtgatggacgtcgcggatttcctgaaagcgaggaatgaccgcgattatttaatgttcatgttcggcatatatacggggcttcgcatttcggacattctgaaattccgtgtccgcgatgtgaaggaaaaagacgccgtttatatacgggaagaaaaaacgggtaaggaaaaacgcttcccgataaattccgaattaaaacctattatccaggaatttattcgtgggaaaaaggactatgaatatttgttcaagtccccgaatttcccgaataagcctatcaccagacagcaagcctataacatattaagccaggcggccgccgcgtttgggctggattctatcggcactcacacattacggaagacgttcggctatcatatgtaccagcagacacacgacgccgtgactatcaaggaaatactgaatcattcggatatatccgtcacgcttcgctatatagggataaaccaggacaataaagacaaggctatcaaggggctatcattcaggaagaaggcccacaaatagccttgtctttatgtgtgtatatgcgcctatgtatgggccgaagaatgggaagcgctttctttcttatgccttgtacttgacacaatgagcctatgacaaatgatatatgtcactttcattcgcacttaattgaaagaaaacagtcacggcacgacttgacacaattacaagatatgtcaagagaaggaaggcaaagagagagccgccagggcgaacgaacattcgtaagaaaatcgccgccggccgggtaggttcttccggcgccctgacaaggcttgcgggtaagcgaagcccaaaatctgtctagctacaaagaaaaaaatataaaagttgccgtttccgcttttccggccagaaaggaagtgagagcatggcgaaggctgacacggattcaacgaaggttactgacattgacagccttaccgtttcggcggccgtcctggggggaatcttcggcgtgacagatcgccgcgtccgccagatggcggaagaaggaatcatcgttcgggccgcaaagggccgctataatcttgttgaatcactaaagaattacatactgtctttaaagctggccgccgaaggcgcgacaatcgacgggccagacggagaaatcgacattgacgaagaaaaggcccttcacgaaagagtgaagcgccacatttcagaactgaaacttcaaaccatgagaggggaacttcacaaggcggaagacgtcgaaaaggttatgtccgatatgctgtccgcctttaagacaagggttatgaatatcccgtcgaaggtggcgccgattctggaagaccgcgacgctggctatatcaaagaccggctgacaaacgaagtcgtcgaagcgctgaatgagttgaaggactacgatccgaaggcgttctattccgacgaatacgtcgaaggggaagaagattatgaggaataaaaaaattacggtggaagaatcgccgcttgtttcccctgataccgtcgtcgtgaaaaagcgtcataaagatttaggaatagactacaaaacaattaaactattccgggatattgcaaaagtagttgcgccgccgccgattctgacggttagtcaatgggcggatcgttatcgaaaattgtccgctgaatcttcggcagaaccgggacaatggaacactgaccgggcgccgtatcaacgcgaaatcatggacgcgataaacgatccagaatgtgaagaaatcgtgataatgtcttcggcccaggtggggaaaacagaacttatattgaatatcatcggttattttatagcctatgatccggcgccgatgttagttgttcaaccgacagtcaaaccgatggcggaagatttttcaaaagataggttgtcgccgatgatccgcgacacgccgtcattgaacgggaaagtccgggacgtaaagtcgcgcacttccgggaatacgattcttcacaagacatttcctggcggtcatataacgcttgccggcgcaaattcgccgtcaagccttgcgtcaaggcccgtccgaatcgtgcttatggacgaaatagaccgctatccggccagcgccggaagcgaaggaaatccgataaaacttgttgaaaagaggacaacggccttctggaaccggaagaagataaaagtatcgacgccgacgatcaaaggaataagccaggttgaaaaagaatttgaatcaggttcacaagaagaatggtgtgttccttgtccggtatgcggaaagtatcaaccgtatgaatggccgcggatccacttttcagatgtgacaatggaatgtaaattttgcggcgaacatatcccggaaattgactggaaacagcagaccgggaaatatatcgcaaaattcccggagcgccgccggaagcgttcttttcacctgaacgaattagcgtcgccctggaaacactgggaagaaattatccgggaatttaaggaagcccagcatgaactaaaggtaaacggcgatattaacaaaatgaaaacgtggatcaataccacgcttggcgaaacatgggaagaacgcggagccagcgcggacgatgattcattgataggccgccgcgaaaaatacgaagcggagatccccgacggcgttcttcttctgacggccggcgttgacgttcaggacgatcgcttcgagatagaaataaccggctggggccgtggttatgaatcgtggggcgtccggtatgataagattttcggcgatatggaaaaagacgaaacctgggacaaactagaagaataccttgaccgggaattatactttgcgtccggttccggccttctgattgcttgtacttgcatagataccggcggccactatacgacggaatgttataagtggctgaaaaaaatggaagcgaagaataaaaaaatttacggtataaagggaatgggcggccctgggattcctttaatacataaagtttcaaagaataatgaatacaaagtgaaaatctttatcctgggcgtggattcaggaaaagaaattcttatgacgcggttaaaaatcgaagaagaaggccctggatattgccactttccgagcaattccgaattgggatataacgaaacttatatcaaggggctaaacagcgaacagcgcgtcgttgaattgaaggacgggcggcccgtgattaagtggaaaaagaaggctggaaccagaaacgaaccgctggatcttcggaattattcgacggccgcggcggaaatccttcgtccgaactttgaaatcctggaaaagaaggtaaaagccgggataaattacatgaaaaaagcgccggcgaagaccgggaagaaaagaaaaaccggggcagtaagccgcggagttcaactataaggcggtgataatatgggaaaattgcagaaagaacgcctggaaagatataaaaagcggcttgaaatgtattatgaagccgaagaagccgtccttctgaatcaggaatacacgatcggaacaaagagcctgaaacgggccgatttgtctaccatacgggcggcaattaaggaactggaagggcagatcgaagcgctggaaagtaccggcggaaaaaacaaggcggcgcgatttcttccgcgtgacatttagaaaggcggtgaagaaaattgaatatcatagacaagtttgtcgaagccgtcaatccttcggccgccttacgacgtcaaaatgaccgaatcaagctggaactgatccggtcatttaaaaattccgggtatgatgaaagcggcgcgtccaggaataaaaattccatgcgtggctggctggcgtcgagtaaatccccacaagaagacatagaccggaatattccgatccttcggcagagatccagaagtctttatatgtcggcgccgcttgcagtatcggcaataaagacgaatcgaacaaatattgtcggtgaagggttgcggctgaaaagcacaatcgacgcggccttcctgagaatgacgccagaagcggcggcagagtggcaacgcaacacggaacgcgaatttgagttatgggcggattcaaaattttgtgattcaacacgggttaataatttttatgagatccagcaagtcgcgtgtctgtcctggctgatgaatggcgacgcttgcgcccttgtggagtatgaacggccgacgccggcgttcccttatggcttgcgcgtccacctgatagaagctgaccgcgtatcaacgccgcacacaagcggaacggcggtcaatctgtacgcgacggaaagcacgacggggaaccggatatttaacggcgttgaagtgacggacgccgggcgcgtggtcgcgtatcatatttgttctacctatccgaacagccagcttcgggcggcgaaaaagtggcagagggtgaaagccttcggggataagacgggaacgccgaacgtcttaatgatttttgaagcggaacgcgcggaacaatacagaggggttccgtatctggcgccggtgattgaatcattaaaacagcttacaagatacggtgaagccgaaatgatggcggccgttatcaacggtttttttactgtcttcattacttccgaaggaaacaccggcgaagtgggatttaccggggttctggacgacgaagaccgcgtttctgatgatgatcttaactatgaattaggccctggaatggttaatgtcttaaagcctggggaaaagattgatattgcagattcaaagcggccttcaagcaattttgacgccttcacgacagcgcttgcaaagtatgtcggcgccgcgctggaaataccggtcgaattactgataaaatcgttcaattccagttattcggcgtcacgcgccgcccttctggaagcgtggaaggctttcagaatgaaaagaaaatggctggccgctgatttctgtcaaccgatttatgaaatatttttgacggaagcgatcgcaaatggaagaattaaggcgcctggattttttttagatccggcgattaagaaagcatattgccgcgcccagtggaacgggccggcgcctggtatgctggatccggtaaaggaagcaaccgcggcagaaaagagaatcgcgatcggagtatcaacgcgccagcgcgaatctatcgaaatgacggggacggattttgacgcgaacgtcgcccagcttgccagggaaaatcagttgatgaaagaagccggacttgtttcggccgccgcgccgcctgggagcgcggaagaaaacaaggaaaaggagagtgaaaaacccgatgaaggagaagaagacaaggatcctgaatcagacggcgacaccgacggcgccgaagaatcagaggatcaataaattctggaatttcatcaataaagacgatgaaacggcagaattacagcttttcggcgaaatatccagtgaagaaagttggtggaatgaagattgtgttacatatcgaaattttatcgccgatctaaacggattaggagaaaagaaaaatataaacgtgctgatccagtccggcggaggtgatgttttcgcggcaaatgcaatatataacgcgctgattcttaataaagcaacgatcaccgggacaattatcggggtttgcgccagtgccgcaacggttattttgatggcttgtaaaaatagaaagattgctaaaaatgcgatccttatggtacatgatccggcgacggttcttcgcggttcctatacatcggaagaacttatgaaattagtggaagcaacggacaaagtaaagaaaagcatagtaaccgcatatatggatcgtcttgataaaacggaagaagaaatcaatcagttaatggacgctgaatcatggtatgtgggccaggaagcagttgacgccggtttttgcgatgaagtgatagaaaccggattccaggacaacggattttctgaccgttcaataacggacgatgtttcttataattttaaaaactatctggaaacttccgtccctgaaaacattcggaaaaaggttcaggatctttcgataacgccgccgaaagacagaggaactttttcaaataaaacaacgaagaaaggaaatgaaaacatgggtgaagaatcaaccaaaaacacgacgccggttattactgacgccgcgcatttaagaagcgtctatcctgattttatcaatcagattgtggcagacgcggtgaaagcggaacgggaacgcctgaaagcgattgacgaaatcgcgtccgggattcctggcgatgtgctgacacgggcgaagtatgatgaaccgatttccgccgctgatcttgcgctggcccagatgaaggcaaacaacaaggccggacagcagacgttaaataatatagtcgatgatctggcaaattccggcgcttcttctgtcgggactacgccgaacgccggagccggcggagaagaagacaaaaaagcggagagcgaagcaaaagtcaataatttcgcttcgtttcttggaaaagataaaagaagggggaaaagagaatgaaaatgtttgagcagatcggagagtttacgccggattccttaattacttccgaagatttctcgattctgaaagaggggatcgggttgaaagccggccagggcgttttgaagcgcggatccctgattgtcaagtctgaaaaagccggctatcttgccgggacggcagatattgaagggaagatcttcggaatccttacggacgataccgacaccggagccgacgccgccggcgacaatatcccggccgtgtgctatcagacggggaattttaaccgcgccgcggtgatcgttgcggaaggtgcaactgttgacacttacgaagacgatatgaaggccgtttctttgttccttcgtaacgtccagaaatatgaataaaaagggggttttaaaatgcctgacttaacaacacgtgaaatgatggaagcgatcgatcagacgccgcccgtaagaacttttttacagaaaacctttttccctggcgaacagacgcacataaccgaaaaggtggaatttgacgtccgcaaagggaaaagaatcatggcgccttttgtaagtcccagaaaaggcggaaaggttatcacgcgccagggattcaggacgaatcagttcactacgccgaagatcgcgccggaaagagtgctgacaatcgacgatattaccaaacgcgcgatcggagaaaatatctattcgcagaggacgccggaagaacgcgaaaacgaacttttggcgaaggatatgacagacctggaagaatctatcgccagaagaaaagagtggatgtgccggcagattctttttgaaggaaaaatcgacgtcgtggacgaagaagaaggcgttgacgttcagatcgactttggttttgataatattgtcgtcctggcggctgatgaacagtggacgattgccacggtggatcctatgattcttcttcggaaacttcggaaacggatcattaaggacaccggaagagcgcccgacattatggttttttcttctgatgttatagaagattttaccacgaatccgttcatcgaaaaagctatgaatatgttgaagtataaaaacattgtgatcgaaccgcgcgtcattgatccggccctgacgttttacgggagaatcgcagaactggatcttgatatttatagttatgatgaatggttcctgaatgatgaaggcgaagaagaagcgatgatcccagaaggaaccgttcttatgggacattccacgggagaaggccagatcgaatatggccttgttacgcagatggaagataaaaagtggcagagttacgaaggaaaacttgtcccgaagaaatgggcggacgaaaacgacgaagtggaaaaacttcgccttacttcccggccgcttccgcgcccgtttgacgtggcttcctgggttgttatttatgcgagaaagggggcttaatttatggcggcatataaagcaaaagttaccgttatgacaaatggaaaagagtatcggccgggttctatccttccggccgatatttcttcggttgatctggcgttcctgaaagaaaagaagttcgtcgaactggcagacgttccggaagtcgttaccgatgaagacgaagacgacgaaggatttgaaggcttcgacgaaatggatcccggcgcggtaaagagtgaagacgaaatcaggaagatccgaacaaaaaaagatctggtcgcctatgccgcgtctatcggctatgacctaggagaatggaaggaaaaaagcgtcaagatccttcaggaagaaatcatcaactaccaggaagaacagatcggagagagagaagacggccaggaagccggggaaaaccaggaagacggagaaggcgagggcgtttgaaatgcgttcattcaaagatcagttagaaaaggattttgacagtacattctttaacatgaatgagttcgccgagttacacaacatagacgggaaagaagtaccggttgttgttgataacgacacgcttttagcgctgaacctggggaaaaatgctgattctgacggaatatttgaagacgcaaaactattttttatcctgaaaaagtatctggattccgaaccggttatcgggcagatcatagactttgacggtgaatcatatccgatcggaaacattctggaagacttcggcggctatactattattttgagggggaatgaaagttgatttattccgaaatcaaggttacaagcgttgaagaagtacaaaagcggctggggaattttaaaagcaaaacgccgcttgtattatccagggcgatcaatcgggcgattcagaacgtgaaaaagaacatggggaaggaaacttcccagctatattatatttcaagttctgatgtaaaaaaaactgtgagaatcacaaaagcgtcgaaagggagcctgaaagccgcggcaatttccgccggcggcggaatagaactgtcaaagtacaaagtatcaccgaaaacgccggtaagataccgcggaaaatcacgttcgcccagggtgtataaagccggggttaaaaaggacggcggaataaaaccgcttgacggagatccgaagtcttttgtcgccgtgatgaaatcgggacacgtcggagtgtttaccaggaaaaacggaaaaagtcttccgataaaacagctttacggcccgtcggttccgcagattgtgaagaatgaagacattatgtctaaaatcaacaaagaagcgtctgaaacgcttcaaaagagaatcgacgcggaaatcaataatattttacggaaggggtgattgaaccttgcagacggacgttcttcttcaaaaggcgcttgtcgaagaagtgaaggaagaattgaaaaattatacttcggtcaataacgacggggaatatatcaaattcaatgtctatccgcagaacttaccggcgaagaaagggaaaaatgacgatgaacatttcccctatgtcctggtatgcatggacgaagaacagatcaacggggaagatgatgatctgatatgttcgatttatttccttgtcggcataaacgataaaaacccgaacaaacaaggccactttgatattgcaaacgttttgaaccgtctttcaaagcgcttcctggaaaaacgccttgttaatggccggtacagaatcgcctttccactcacgaaaaaattccaggaagaagacacatatccgaagtttatcggcggtatgtctacattatggacgttagaaaaaccagaaatcgaggaaacagaatatgactaaaagtgaatcgcccgttatgtacttagggcctacgatccgcggcgtcgtgaaatacggcgccgtttttagtggcggaatccccaaaaggcttgaaaagctggccaggaagaagcccattgtgaaacagttaatcgttccgctttctgacattgtgaaagctaaaaccgcaatcgacaccgaagggacggtcgaagcggtcgcctacgacaagatcgaagcactttcggaagcggaagtcaaaaaaattacggaaggagaataaaagagtatgtctaattataagcatggaatccgcacgagccgccggcccactcaattagcggttccgattacgtctgacggttgcttacagtgcgtaataggaacggcgccggtcaacctggccgcggatccttacgacacggtaaacaagccgtttgtttttcataataaagcggccgcgattgccggcctggggtattgtaccgacttcaaaaattataccctttgccagtccatgtatgcgactttcgatgtgttcggcgtggcgccgctgattatgattaacgtcctggatcctgaaaagcacgtgaaagcggagttatcgaaggaatacgccgtcgagggcggcaaagtgaagattcctgaaacggggattttgcttgataaactttcgatcgcttcgacgggagagtccgaaacagtgtataagcctgatgaagattatatcgcgtctttcaatacggacggaaccgttacggtggcaatcgtaaccacgggcgccgcggcggcagaaaagaacctgaaagcaaccttcgcccagcttgatccgtccctggtaacatacgaagacattatcggatcctatgacgtgaagacgaagaagaaaaccggaatggaactgatcggccgcgtatatccgaaattcgggatcgttccgtcgcttcttctggcgcctggctggtcgcatattccggccgtaaaactggcgcttgcggcaaagtcccagcttatatcaagtcttttcacggcgaaggtcgtcgttgatcttgataccgcagaaggcaaggctgacagcatggaagaagtgaaggaatacaaggataaaagcgcgtgttctgaccgcgacactatccccatgtggccgcttgttggggtaggggactataaatattactattccgcgcagatggcggcgcatatggagtatttggccgcgaataatggcggcgttccgtcccgttccccgtcgaataaggatattaaaatcaccgggctttatacggcagacggggaagaagttgtccttgaaatggacgaagcaaacgactatctgaacgcttgcggcgtcgtgacggcgatcaatgtcaacggctggaagtgctgggggaataatacggcggcttatccgtcttctacggatccgcttgaccggtggatcaacattgtgacgattttcgattatatcgaaaataactttaagctgtccttcttccagaatgtcgatgatctgacaaattatcggctgattgacgaagttgtgtccggctttaatatgcagttgaacggattacagggttcggacgatatagccggcggcgaaatcgtcttcgatcacgacgaaaacccgatcaacgaaattctgaacggacatatcaaattccatacgcggatcggtggatatgcgccggcggaagatattgaaaacgtcttcgagttcgatcccacgattaccgaagccgcgcttgaagggggtgctgaataatgggatataaaattcctacggtattaaacaattttaacgcctacggatccggtcacaaatacgtcggcctgacttccgaagtggcgcttcccagcttcgagtatttaaccgaaacgatcgacggcgccggcattggcggagaaatcgaagaagcggtcgaaggttccttcggttccctggaaacggaaacgtccttccagaatatcggccgtgaatactttgattttgtatgccagaccggaatgattacctatcgcggatctatgcaggttttaaacacggcgacgcagacaaacgactatgaagggattgttgtcaccacgaagggaaaagtgaaatcgtttgaacttggttccctgaaaaaaggcggcaagggcgaaccgaaagtcgtccgggagattacctattgcaagatcacaataggcggcgcgacagtccttgaactggataaattcaatctgatatggaagttaaacggcgttgaccgtttacagaaggttagaagccagatttaaacaaaaggcggcgaaatgctttcaggcatggcgccgccttcatcatgcaaaaaagaaagcgaggaaatgagcaaatggaaaactatcaggaaatgaacagagaagactataacggagccgaaggcgaaaaccagggaatgaacaatcaggaaatcccggtcgcgcagtccccggccgcgtctggcgcgtcccttcttccggcgaaagagggtgacgacgacgaacttattatcaagttcagaaagccctatgtctttgacggggaaaccttcacggaacttgaccttcacggcctggaagaccttcgcggccgcgatttgacagcgatcgaaaaagccttcaacaagaccggcgtttcttcctttgttcccgaatcgacgacgacttacgcaaagatcgtcgcaacaaaagtcaccggccttccggccgaatacttcgaggatcttccggtcggagaggtggaaaagatcaaaaatgccgtcgtgggttttttctacaaagacgaataaggcatgattccggccgcgacattcagaaaacttcggtttatctgtctatggcgacaaataccggaatggacttttttaccgatcttccggtcgatgattttatcgacatagcaaaggaagtgggcgaaattggcaaacaaaacaacttacgaactggcgctagaaatcggcggtaaaatacagagttcccttgaaaagtcggtcggcggcgtcaataagaagctggattctatcggaaaagccgcgaaaacggccgcgaaaattgccacggccgcgtttgcggcggtaaagataggcgatttcgtaaaagacgccgtttccgtctatgcagatttcgatcaagcgatggcgaacacggccgccacggccggcgccacaagtgaagaatacgcaaaactggaagccgccgccctggaaatggggaaaaagacaaccaaaacagcaacggaagcaagcgaagccctgggatatatggcccttgccggctgggacgtgaacacttctatttcggccctggaaccggttcttcggttgtcggaagctactggaatggatctggcgacgtgttctgatttggtaactgattcaatgagtgcgttgggccttaccgtcgatgaactatcaggctatcttgatgtggcgtgtaaggcgaataataaatcaaaccagacggcgcaacagcttatggaagcatatatcggttgtggcggcgtcctgaacaatttaggcgtatccgtggaagatagcgcgacggcgcttggagtgctggcgaaccgcggaatcaaaggatcagaagccggaaacaaattaaatactgttttaattaacctaacgtcgggaaccggccaggccggcgcgatgatgaagaagttaggtatttccgcctttgacagcgaagggaagttcatcgggcttcaagaaacccttcaacttgtcaatgaagcaacaaaagacctgacagaagaagaacggaacgccgcgcttgcggctatcggcggaaagacgcagatcgacacgctgaacgatcttctgtctggattgaataccacaacagcggacggccgttcagagtggcaagccctaaacgatgaactatacaacgcagaaggcgctatgatggatatggccggaaaagtgacggacactttaccgggcgcgatggcggttttcggttccgcggtagacgacgcgaagatccggttgtgtaaaatcttcgcgcctatggcgaaggacgcaattttcgcagttgccgatcatataccgaaaatcacggaaaaagtgaccggatttattcaggcgctatcagaaagggccgttccggcgattgctttattcaaggataaggccgtcgctttctttggaatggttcgtccgattctggaagatgtgaaaaataaaggcgtcgcggcgtttcaattcctggcgaataccggaagaacagcctttgaaaatatcaaggcaaaaatcgaggaaaacaagccggctattgataaggtgatcgcggtcgccctggatctgaaagataaattttttgaagcgtttgaaaaggcgaagcccgtcatttcttttattgcaacaacggcccttccgtcggttgttggcgctattatgaaagtgatcggcgccgcggccacggtctaccagaagttaaatgaatggggggcgctgaaacctattattataggcgttgccggcgcgatagcgtctatgaaaatagtcgggctggcaaaagataccatgaacgcggcgaaggcggtcaaggcccttgtaaccgtgtttatagcagaaaagaaggctatgctggcaaatatcgccctgaaagtaaaggataaggcggaaactttgtatttgcacgccttatatgcgaaagacgcaattttgaaaggagccagcacggccgcaacctgggcgcaaacggccgctatgacagcatggaacgcgatttgtacggtaggaacggccgtcacttcggcacttggcgccgcttttaccttcctgacaagcccgatcggccttattatcctggcgattgccgcggttgtggcgattggcgttttgctttataaaaactgggacacggtgaaagaaaaggcttcgcagttgggacaatggatcgtcggcgtatttaacaacctgaaagagaaggccacggccgcgattcaggcgttcgccgacaaatttccggccgcgttcgctttcatatcctcaattttcgagagttggaagcagaccgtgacgggcgtattcgacggcgtgaaacaggtattccaggggatcattcagtttgtgaccggcgttttttctggcgattggtcgaaagcgcttgacgggctgaaaaatatcttttctggcgccttcaaggctctttcttcgctggcgctggcgccgcttaatgcgctgaaaggcgttgttgtcggcgcgttcaatgcgatagataccgcgacgggcggaaaattgacggcgatcaaagaaaaggcgtccgccgcctggacttcgatcaaggagaaggccggaaccgttctttcggccgcgaaagatacaatcacggaaaaactttcaaatataaagtcggcatacgagcaacacggcggcggaataaagggaatagccgcggccgctatggagggagtgaagggctattatacagccggatattcctttataaacaacttgaccggcggaaaattggaagaaatgcggtcaaaattcagtgaaaaattgtccgcggtgggaacgaacgtttcaaacgcttttaacagcgtgaagtctacaataggaaattttatgtcccaggccgtttcaaacgtatcttcaaacctggaaagcatgaaaacagcatacacgaacgccggcggcggaataaaagggattgtcgccggcgcgatggctggcgtacaaggtactttttcaaatgttatgtcggccgtgaacacattaaccggcggaaaactggaatctatcagatccgcctttgcttcaaaactggacgcggcgaagcaagccgcaacttcaaaatttgaagaaatcaaaagcggaatatcgtcgaaactggaagcggcaaaacagaccgtacaaaacgggctgaacgcgatcaagaatttcttttctggttgccacttatcgcttccgaaaattaagttgccacatttttcaataagcggttccttctcgctttcgccgccttcgattccgaaaatcggcgtcgagtggtacaaagacggcggaatcctgacggggccgacgatctttggcgcgaacggcggttcccttttgggcggcggcgaagctggaaaagaagctgtccttcctctttctgaattatggtcaaacatgaaatcggtcgtcgccggcgtggtcgggagccagccggaagcaagcggcgccgcggatatgttcggaagaatcaaacagttagtcgaaggcggccaggcggtaggccaggaaggcggatccgtcacaaaagaactttataacacaataaacaataataacaccgtgaacagaaccagcgaaacgagttcaacggacgattcacaacggatcgtctattcgccgcaagtgattatccaggggaacgcgagcaaagaagacgttcagtcggcgcttgatatgtcccaggagaaatttaatcaaatgatggcggaatacaactggcagaatcagcggacttcgttcgcgccggcatgaaagggggcctgatatatggacgaaaaccggatatataccacggtacaaggcgatatgtgggattcaatcgcctatcagttttacggggacgtgaaatatatcggccttcttcttcaaaataacgccgatttgctggaaatttacgtcttttcggccggaacgaaggtttatatcccgaaattgccggaagaagacgaagaagacgtcccggaatggagattgtaaagcatgaaggcgcgtcaatcttccgtaactgtattatataacggtaacgacataacaaagacaattactgactatatcgaaagttttcagtatgtggatcatgccagtggaacggccgacacggtgactttgaagctgaataacagaagcggaaagtggtcgggaagctggatccccgttcagggggattatgtcgaaacaattatcaaactgacaaactggaagaaggaaggcgacaaccggaaatttaattgtggatatttcctgattgatgatttgagtttttcggggccgccttcaacggcttccgtcggcggcataacgacgccgatcaatacagacttcaacgtcacaaagaaatcgaagacctggaagaaaacgtcggtgaaaggaatcctttcagaaatcgcaaaaaaagccggcgtcgggcttttcttttccggtcaagattatccggtcgatgaactggaacaatcgaatcaggaagatatttcattcgcctttaatctttgttcttcctacaatctggcaatgaaattatacaaccggaaaatagttgtctttgatagtgtggagtatgagaagaaggggacgtccctttcgattgaccggacggaaaccgaatcatggtcggcaaaaaaaggaatgacacgcgcttatgacggcgtttcgatttcttataccgattcaaagaagaatcagaccttgacatataaattcatgttgcaagacggaagccggatcctgaagctgaacgaaacagccgaaagccttcaagacgccgaagtcaaggcaaaggcgaaattgcttgaacataacagacaatgccagacgatgaatgtaaaagtcaagggggacacgaaatatatatccagcaagtgcgtaaaaatgaccggcttcgggaagctggacgggaaatattatattgataccgtcacgcacgaaaagaacgccggcggcggttatttttgttcgctggatatgcacttgtgtattattgtaaaaggcgttacggttgcgacggtcgcttctggaagcactacaaagaaggcggcggatccttcgacgaaggctaaaacctatacgattgtatcgggtgataccctttggaaaatcagcacaaaccatttaggatccggcgcaaagtatatgcagatttacaacgcaaattcaagcgttatcgaatccgcggcaaaatcacacgggaaatcttcgtccagtaacggacattggatttatccggggacgacactaaccataccaggatagagaggggggcaagaaaatgtctgacgttgtgcgcgtcggctatatatcggccgtgaaccatgcagagggaacggcccaggtcgtttataaggatcgggataattctttgtcacccttcatgcctttatggtctaatgaatggaatccgccagagattgacacaatggtttatgttattcacttacagaacggcggaacgcgcggaatgatacttgttccgccttacacaaccggaaaccggcccgtcgaaggcgtggccgggatctggcggaaagacttcggcgacggaagctatatcagatacgatcgagaagaaaagcggcttgacattgtaagcgattctgtacacgtggaatcgctgaatatagccggtgatttgaccgttgacggcgctattgaagcaaagtcgataaaaacaaccggaaacgtccatgtgggcggaaatttgaccgttgacggcagttatccggggtagaaatggggtgattctgtttgataggctatttcggcgaagtgatatttgaaacaaacgatagaagaatttgcacatttaacaatttaaaaaggacaatttcggcgtcatattctgaacacaagcgatatagaaaaaaatccgaattggagtttgaagggccgcagaaccagggcgtaacttttgaaatgaaatttatcgccggtcacggcgtccggccctggagcatggttcacaaaataaccttgatgtgtgaacaaggggttgtaaattctttcgtcctgggcggacacaaagtcggcggcggaaaatgggttataaccggaatagacgaagattataaagaagtctggaatcacggcgaacttgtttccgttgcgattacagtcacggcgaaagaatatctgtaaggcggtgatattgtgttaataatagacgacgttcagattattataaatagtgtctatgaaagggaacttcgggaagaaattcttgaaaaggccctttttcttttgacttgtataaaaggcacaatcccgaataaccgggaaatcgggctggatcctgatattatttcaagcccggcctatatcgcgcagaatctttatacaataagtgcgattgaactaatagaagaatttgaaccacgcgcaagcgtggaagaagtatcatttatagcttccggcggcgccggaaatatgattccgaaggtggtgcttacatacaatgcagaatgaaatttcaaaactttataatttgcctgatatttcctttgtcgatgatatatcatacgaaaaaattttgaatgaaatgatcgccgactatgaaaagaagtatcaggaagcaaccggccggaaggttacgcttcgccctggcgacaaagaacatatccatttaaggatagaagccggtcaatactttcaaatgtatcaaatattagataatgcggcgaaaatgaatcttttgaaatactcaaaggggaatttcttgcggcatttaggcgccttcaagaaaacctttattcaggagccgaaaccggcagttgtgacggcgcggttcacactttcggagataagaaaggacgtgatctatattccgcaaggaaccagaatcacggccggcgatggcgtgtattttgctactgatgattacgcggaagtaaaagctggcgattccttcgtcgatgttgactgtacgtgcgaaaccgtcggggaagtcgggaatgaatatattgtcggacagattgaaacgatcgtcgatccggttccttatgtttccggcgtatcgaatattacaaaatcagacggcggaaccggcgaagaatccgaagacagcttccgggaaagaatcttcctggcgccttcttcttattccgtggccggcccggcggacgcttacgaatactgggtgaagcagtataacagcgccgcgattgaagatgtgaaaatatatgaaccgacggaagcggtcgttgatattcggatccttctggttggcggcgcccttcccagcaagacgttttgttccggttgcctggaatatttacgggaaaacccgatcataccgctaacagacaatgatcttgtggcggcgcctgatgtggtgaattataacctgaaagcggtttactatatcgcacgaagcgacttgaacaatatcaaggtgattcaggaatccattgaagccgcaaaagaaacatatttaaactggcagaggacgaagatcggccgggacataaacccggacgcattgacggaatttgttcgcgccgccggcggaaagcgcgttgtgataacttcgccggtatttacgccgattcctgaaacgtcgatcgctatggaaaaaacggttgaatttacatacggtggaatagaagatgattaaacttgcagattaccggacagaaaacgcgcttccgtccgaaatgaagacgcctgaaagaatcgccctttcgtatgccttcgatatgcagaaaaagaaatattttgaccgtgtgcggcgtgtttatatatgggcggatctggaatccgtgtctgatgataaacttgactttctggcggtcgaaaaccgtgttttattttacagcccttccctttcgcccagcgtgaagcggaacatgatccgaaattctatttattggtatatgaagctggggacgcgccaggcgatggaagaaatgattgatacggtattcggaaatgaaaatacttccgtcgaagaatggttcacctatgccggagaaccttttcattttcggattgccgtcggaaccgaagtcacgcagacgtcaatcaaggaatttttgaaatatttaaaccaggtaaaaaatgcgcggtcgcgcttcgattacatggtttttcaaaatggaataaaactggtattcaaacagatttcagaatttcaatcttttgtttatacattttgcggtgaatttgagtgtggcacttatccgaatacagaagtcggattcttgccttccgaagtgaatatcacgctggaaggcgccagcgatagcgcaaatacagtatatacaaacgccggaaccacgccggatatttccgtcggtgccgcgcttgtagaaaaccagattgattttcaggccgcttccgaagaaggtttttctgtctattcttcggacagtgaaacagaatcaggaaccgcgccggatatttccgtcggcgcggcatttaccgacggccagatcgacattcaggccgcttccgaagaaggtttttctgtctattcttcggacagcgaagcggaatcgggaaccacgccggatatttccgtcggcggccagtttgccgaagccgaagtcgatattgaaggcgaatccgggacgggttcaacggtttatcaggaaaccggaaccgcgccggatatttccgttggcgcacaatttaacgaagttcaagtcgggcttgaaggcgaatccgggacgggttcaaccgtctacaccgaaaccgggacaattcccgatccttcggtcggattttccggcgcggaaagcggcgtttccgcggctggggaaagtaccggctatgacttatattataacactgacgcggacaaatacgccgcggaagaatagaaaggagtttggaagcatgacagaagcaagctatattcctttgacggccgaagcgctggaagacataaaggaatatattaaaaaagttatcgcttatgcggagtacagatccggcgaaacctggtcgaaaatcccgatcgaaaaagtggaaacattaccggacggccgcgtcgctatctatgtaatgttcgatcacgaagcgccggacgaaatcaacgggatccgcttttatcatcgggacggctttatgtgggccggcggaaatgagaatttaaacaaggcggaatttgacgaagggattcagtaccgctataccctgaaaatcgtccagacttcggcaaagagttagaagggaaggtgaagaaaaatgtatatcccggtattttgggaagatcgtatcgtccagtatccccggcgcgtatccgttgaaagcctggggaacggtctgtataactgggcgccggcgcctggcgaagtcgagaaaaaaggcacacaacagagcaaaaggaacttcggaaacatggatttcggagttctggaaaacgccctgattgtcgggtttgtgtcaatgaatcttcggttagtccaggaatcgcttgacgatgtgcgcggccagattttgacggtcgatcttaaaaacacgatgaaatatccggcgacaaacgccgaaaaaacggttacgcttccgcgcccggcgaataattccgattacacggtcgaagcggagatcgtcgaagctgacggcccggtcgaaaacgtcgaagtgtacggaaaagccctgaacgccttcaaggtatgttattcagggagcgctaaaaacgtaaccttgaaacttcatgtgatagggggcttgtactaatggttggtataattgttaaatcagatgaacgacgcgcccaggaagctaatattttacggcagtttggcggcggttcccctgaaaattccgatcggctgaatcgggagtatgcagaggaaatcaacgccagaatgaacgaagtaaaaagagaggtaggtataacgcgatgaaaattatcgaagcaaacgaaggcccgaagattcactatgaagaatcgggaacctggatcaatttcgacgatcagatcatgctgaacctgaaaaagagcgaagcggatcacgacgtccatatcgacattacttcggacgccttcggacgcctgaacaccggcgccggcgcctattacgtggcccaggtagacattccggccaggaaatacgacgaaacggaagttccgaatcctgattatgtggagccggcagaggacgacgacaccggcgccggatacgtcaacaaaacaatcacaaaacgcgaaccgcttccgttttctatggaaaatgtgacagtgactttgttcgccctgaaagaaggtgtattctaaaatgaaaagttacaattttgacagcttgaaatttgcaacggaagggctgactggcttcgggtgtaccgtgatccaggataacgcgaatcttccttccttcatgatcccgatcaacaagcgcacaaacgcgcagttgtacgaaggcggaagccagaagacacattccgccttcgttgtcgatgatgtggaatacaagcgattctttatgagtaaatttttgaattgtatcatcaacggccgcgcctattcctggcccggcatggatccggcggcggtgattgattacgacgcttcacacgcggcttgcaacgcaaaaggcgccggcttccacctgatgagtattcccgaacgtgcggtcattaaccacttaatctataaaagtggttttgttccgcgcggaaatacgcagtacgggaaaagtcattcccacacatacgaagccggagagcaaaccgcagacgaaagcgacggaagcggcggacggcgcacaaccaggacggcgacgggatccggcccggcgacgtggttccacgacgggacaaggaacggaatcgccgactgggtgggaaacgtctggaaatggagttccggtatgcgtattaaggacggagagattcagatcttcgttggcaacctggccgcgaaacaggtcgcgcacacggacgcaagcacttactggaaggctattcttcccacgggcgcacttgtggagcctggaacggccggaacgctgaaatatacaaaggatctcaagattgtaaccgcgacgggcggagccggaacaaacagcacgtcgaatttcggaagcctggccgccgcttctggcgtgacaatccccgaaattctgtatgagttaatgcttgcgccgaaatccggcgtaacgcatagcggcggattttggatcaataccgaaggtgagcgcttgccgatcgtgggcgccagcttcggcgacacgtcgtactctgggccttccgcgttgtctttgtaccacgtccggtcggacgtgggcacgggcatcggcttcttttccgcttttatggagttggaatctgtaatctgaaaactgtaaatctgttaggggccacgatagtggcccctttgtttttagaaacagaaaggaacctgaaaagtgggacaacaaagaagatatgatgatcggccgcgcggcaatcccgaaaccgacgaaggacgggatcaaagaagcggcttgattatattgcagaaaacgaaagacgctatgaaatatttatatacttcgtgggtgaaatatcccaggagtgaaaagttggggtttgtttcggactataagaaatgtttatttcaattcctgatttacattatcacggcgcaaaagaagtattacaaaaagaccacgcttcaagacgccgacgtccagcttgaacttcttcgacttttcaacgatctttcgtatgatatgagatttattgatgaaaagcgttatcagttgatttccgaaaggcttaatgaaataggacggcttctgggcggctggataaagtcacaaaaggaaaccagcacaacaaacgggaaataatattcccggtgggaataggtcaaataacgcttgccgatcgtgggcgccagcttcaacaacacgtcgaactctgggccttccgcgttgaatttgaacaacgtccggtcgaacgtgaacacgaacatcggcttcttttccgcttaccctttgagccagacgggaaagtttacggacttttcacagtgcatgaaagggaaagggatctatccccgttctggcgaagccagaagaattgacgccgctatcaatgcagttagtaccgaaccagaagccggccagggctgaaagggaagggctagaagggtgtaacgggtagcgccgcgccttcggccgaaagcctgggcgcaagtcccgtctgtactggcatacagacggtaaaacatagaaagggaaaaggctattgaaaactttcgatgtgacacacgaagaagtgatcgacttcggaaatttgctggaagggcataaaaacgcttcgcaaagcaaacattaccgcgacgaaaatcttgcctttgaagcgcatagggaagatgaattgatcgatcttcataacaaactaacctatttcccgaaagacggggttccgggaaatcccctggaatcgtcctatcatgtagggaagtatcgaaagaagaaaatctatgaaccgaagccgcggatcgtcatggctttatcatatcccgatcgcgtcgtacaatgggcgtattaccagaaattaaacccgttgtttgaccggcagttcataacacatagttacggttgccgcgttgggaaaggaaccacaaaggcgagagaacagcttcaaacgtggcttcgtaaggcttccaggagttctaaaaagtggtatgtgctgaaattggatatagcaaaatatttttaccgcgtggatcatgaagtcctgatgaagattctttcaaggcacataaaagacgaacttatccttcgggatctgtataaactgataaattgtgaagacacggccttcggccttccggctggcgtacaaccggaattatgcaaacaagaagactggatttacaataggggtatgccgatcggaaacctgacttctcaaatgttcgctaatatttacttaaacgaattagatcagttttgcaaacatgatttacatatccgttattatatccggtacatggacgacattattattctttggccggataaaaacgaattgtttcaaatactggcagagatcgaacggttccttgatgaagaacttcgccttgaattaaataaaaagacctgtattcgcccggcctggcttccggttacgttcgtcggagcgcagatcacggcgaaaaagatcattatgcgaaagagtacgcgaaagcgtatgttcctccgcatgaagtttataaaaggactttttgaagctgggaagatagcctttgaaaaggtcaacaatacaatgcaaagttatttcggcctgatacagcatttcacggccggaaatctgttaagaaaaattatagacgaattttccttccgaatattcaacaattcgtaaccggataagccggttattttttattgtctaaattttaagaaagggggcttgtctatgtcggaattatcttttgaaagggaagttcttgatcgtctgattgcgattgaaggaaaacttgacggctacaacaacgcgaaagcgaagacctatgaaaacgaaaaagacatcattcagttaaaagacgacgttcaggacgcggaaaagagaatttcagatctggaagacgcgaataaatggctggcgcggacgattgccgccactattataacaatcgtcgtcggcaccgtcgtcttcgctattcgcatgggcgccggagtttaggaaaggagccgggaaacgtgggaagaaaacgcagaaggaagcggccgccggagttttcaaagaaaatcctgacggaagcaaaaatcgaatgttggatcattaccgccttcggactgtttttcacctggaaggggcttgacgtgacgttcttctgctatgtgattccggtatgctggggcggctatgcaatcgccagggcgttttattacaacaaggcgaaggcggaaaatgcgatcaaacttcgcaaggcataccagaaagccgggcttgacgcggcgccggcggaagaacagtttgaaagcgcgatgaatgaagacattcaggaaacgtattagaagggagattttaaaaatggatttacagaatttgcttgaaactattgtcaataccgtactgattccggcgatcccgatcgtcgtcggtgccgcggttcagtatgtccgcacgaagacggaaggaagcaagattgaagaagccgtcggaatcgtcctggacgccgtggatcagacgaaccagacgttcgcggatcagttgcggaaagacggaaccttcacggaagaaaaacagcgtgaagcgatggaaaaatcagtcaaaaccgcgctttccatgatgaacgaacgcacgttgaagatccttgaaagggagttcaacgacgttgaagcgtggattgtatcgaagatcgaagcggcttgtaaagagaataagagaattaacagctaataaccgggcggcaccttttcacgggcggccgcctttttctgaaagaaggtattttatggcattaagaggaaaagacaacgcggaaaaaatctggaacttttttcttgatgaaggattcagtatttacggaatcgccgcacttatgggaaatctttccgcggaaagcggccttgatccgaagaatcttcaaaattcatgtgaaaagcgcctgaactataccgatgccgaatatacggccgccgttgataatggaacatataaaaattttacatacgacggcgccggatatgggcttccacaattcacattcccttcaaggaaagaagcgttttataaatatgcaaaagccgccgggaagtcgatcggcgatctggaaacacaacttcttttcatggttgaggaaatgaagaaagatttcaagtctgtgtattcggcattgaaaacggcgtccgatgtgaagacaacttcggatcttgtgctaaaaaaatatgaagcaccgaaggatcagtccgacgcggtgaaaaggaaacgggccgaatacggccaggaatattttaaccggttttcaggagccggagaaaagaaaggggaaatcaatatgtctatcatggtaggaagtgcaagaattgacgaaagaggaaacgccagcggcggcgccgccggagatcagaagcagacgtccgcaaaaaacgatctgaccggtgaagtaagtatgcagaaaatgtattcccactctaaagggtggtatattttgcggccgaagtccgcggcacacgcggtaaaaatggcggatctgatgaaggccgcgtgtaacaatgcaaatatcggatacgatcagggcaaccgcctgggggttgtgcaacacggcattatgacagccgttaaaactgaatgtgattgttcttcgcttgtccgtgaagtagtgaaggaagcaaccggaaaggatcccggaaactttaccacggcaaacgaagcggcgtccctggaagcaaccggcctttttgaaagcaagcgttcctatgtatcgcagagcgcgacgccggtatatgacggggacgtgttagtcacgaaaacaaaaggtcataccgtgattgtcgtaagcggaaacgcaagaaaggccgcttccggttcttccagtgcgccggtgccgtccgtttctacggcgaagattgagagcgcgaaagggtttgacaaaacgcttgccggcacatataagacgatcggaagcctttatttaagggccggagccgggaaaggaaagccggaacttgtcgtcatgccgaataatacaaccgtgagaaattacggatattatacccttgttgatggtacaaagtggctttatgtgcagacgacgatcaagagcgttacatataccggtttttgcagtagtaacacaaaatatcttgctaaacagtaaagcaccgttttcaaaatgtaaaataatgttttaaaaactacacttgaccgtttaaataatgtgtgataaaatgggcggcgaagggggttttaaagggggtacaatcccaggacgccaggccgccgctatgcgaagcaaaattccggccgcctgacgcgccagaatagcccaggaagcccccgaacgggttcaagtgtagaaatacccacatacggaagaaaacgtcttaaaacggccgtgtgtgggttgttttattttctggattccggcgccggcttccctgggcgtaaattccggccgcctgacgcgctaggaagcccccggaatgattcaggcaaggaaacggccgctaaaagaaataaggccctttacggggcttatattaagtctgattaagtctgatatactctgattaagtctgatatattctgattaacactgaaatcaaaaagacggccagccggccgcctaaaatatggtgtattcacttgtatttctgaaatttatagtgatactttgcggcgttatcatgtgttcggccgcttcggttatttctatcacttcataggtggaatcaaggttttcttgcactatccgccgcgcgtctgattctgaacacgctttcacatatccaaaatgccccggtacatattccggcgaagtcttcattttccaataagccctataaatcatgttttccttcctttccggccagcggcaccaggccgccggcccttgcaaatttattttgttatcatgcttaccgtggaagcgtcaaggcgaagaaccgtgtcaagaattgtctgtctgtattttaagacgttcgacacacgcgccagcgcttcgcgttctttcttaaatggaatcagtgaaagcgcatactgtacaagattttcttccgcctggcggaatgtttcttttgcttcaaccagcttcgcccataacccggattcctcaaccagctttccaaaatcttcaatcgctttgtcggcggcttcgtcgtcgtcgatggcccatgttgcgacaggaacggaaccgtcttcgtttacgattcccagggatttaacgaaatccgcttccattttcttttcctgggattccagaatgtcaagcgccttctttgcttcgatatatgccttttgttctttactgtattttctcatttttattttccttcctttctttaccttatgtctatattatacacgtgaaagtgtaatttgtcaagtataaatgtaaaaataaagtgaaaaatttaaaagaaatgtttccatatttcattttaaaatgaaacggcggccgcctgggccgccctggtttatatcccgttttctaacgcatacataaaataatcgcgccagcgttcagacatataataatcgaaatcgtgaaacgcataactattacattgcacatcgtgaagatcatgggttgttgtaatgtgcatatcgtcatacgcttgttcgttcgcctgatacccacggatcgcactttcaacatagcttgaaaaattccgcgttccgtatgtgtcataatacataaaattcagactttcaaagaaatctgctaattcacgggcttttcttgcgacttcatatcccattacttcgccattatccagccggcgccatttattaacaattacttcttgccacaattccattttctttttcctttccggccagcggcgccaggccgccggccttttgtcttatgcttccgccaggatagcagaagaaacgcttttataatatccctgaatattgacttgtttctttacaatgtcgctttcttccccaaaattccaggaatcgcggcggattctttcggtaagttcgtcggccatttccttgaagaagtccgcgacttccgcccggctgattccggttttcacttcgatttcggcgtgttcctggttccatttacgagcttccgccgtcttcgcgcggtcgcttataaaaaccgctatcggccagaaacaaatatttttcttcgcctggctgatcttgccgcgcttcgatattttgtgaaggcaataatcagagccgagccagccgggatccccttccgatctttctacgaaatagaatccgttatcagttttgaaatatgatccggtgatttccacaatgtcgcccgttttgatttcgattccgtttttatctgtcatttttattttccttcctttccttaccttatgtctatattatacacgtgaaagtgtaatttgtcaagtataaatgtaaaaatgaagtgaaaaaattcaaatataatttaccattgacatttcaaagtgtattgtgtaaaatagcagtacaaccgaaagaaagaaggtgtaaaaatgaaagctaacacggcagagaagatccggttcctgaaaaatagaagaaatgtaacgctgggagaaatcgcggaagtgacggggcagacgcgccagaacttttcaaataaattaaagcggaacgatttcagagagtccgaactttcggcgatcgccgatttcctgggttgtgaattaaagatttcattcgttgacagagaatccggcgaagaaatctaataaaaatttaaaagagggaaagtcttatgtataatgaaatagatcttgacgcgatcgacacgacgcaagaaccaccgacagaagaaccggcccgtcaatattattttatggcaaaatgccgggaatgggttcgggagtttgaacggaaaaacggacgtcgcccgttcgcgtttactcaaacgttcgggtgccagatgaatgccagggattcggagaagcttctggggattttggagacaatcggctaccaggctgtagaatcagagaaagcggattttgtgctctataatacatgtacggtgcgggaaaatgccaatcttcgggtttacggacgcctgggacagctgggggcctataagaagacgcatcctgacatgatgatagccctgtgcggctgcatgatgcaggaagaggaagtagtggagaaaatcaggaaaagctaccgctatgtggatttgattttcggaacccacaatatcttcaagctggcggaactggtatccctgtgcctggagcggcggacccagggcggacagaagcagggaaaaacgaagatggttgtggatgtatggaaggatacggaccagatcgtagaggatttgccggtggaacgcaagttccctttcaagtcgggagtcaatattatgtttggctgcaataatttctgtagctactgcattgtaccctatgtaagaggaagggagcgcagccgcaggccggaagaaatcattaaggaaatacagaagctggcagcggacggagtggtggaaatcatgctccttggacaaaatgtaaattcctatggaaagaacctggacaatcccatgacctttgcgcagcttttggaggaagtggagaaggtagacggaattgagcggatccgttttatgacatcccatccaaaggacctgtccgacgaactcatagaggtcatggccaggtctgaaaagatatgccgtcatctgcaccttcccctccagtccggcagcagccggattctgaaggttatgaaccggcgttataccaaggagcagtatctggatttggcggagcggattaaaaaggcagtgcctggcatctcactgacaacggatatcattgtgggatttccgggcgagacagatgaggactttgaggagaccatggatgtggtgagaagggtggggtttgacagcgcctttaccttcatctactccaagcgtaccggcacaccggcggcagccatggaagatcaggtgccggaggcaattgtgaaggagcggtttgacaggcttttaaaggaagtgcaggatatctcggcagaggtgtgcggacgggatgtcagaacagtccaggaggtcctggtggaagaggtgaacgaccatgcgccggggcttatgacaggccgcctgtccaacaatacagtggtacacttcccgggagatgcatccatgattggaaggctggtgccggtgtatctgcaggagagcaagggcttttattatatgggacatatagctgataaggaaaatgaatagaaccagacaaacaataaccggcaaattaagataaaacaagaataaacaagcatactagagaagagaggtcagcattttgatagatttgtcacaattatctcccatgatgcagcattatatggagacaaagaaggagtacccggactgtgtcctgttttaccgtctgggagatttctatgagatgtttttcgatgatgccctgacagtgtcaaaggaactggagataacccttacaggaaaggattgcggtctttctgagcgggcacctatgtgcggggtgccgtttcacgcattggattcctacctgtaccgcctggtccagaagggatataaggtcgccatagcagagcagatggaggatcccaggcaggccaagggcctggtgaagcgtgaggtaatccgggtggtgactccgggaaccataaccagctcccaggtgctggatgagacaaagaacaattacctgatgggaattgtatatatggatggaatctacggaatatccaccgcggatatcagtaccggggatttcatggtgactgaggtggattcggaccgggaactgtttgatgaaatcaacaaattttccccgtctgagattatctgcaacaatgccttttacatgtcgggcgtggatatggacgagctgaaaaaccgctatcaggtggttatttctgccctggacagccgctttttcggtgaggaatcctgccgccgtatcctgatggagcattttaaggtgggagccctggtgggactggggctggaggactatgccacaggcatcattgccgccggcgccgtgatgcagtatatctatgagacccagaagagcaccctggagcacattaccaccatcaccccctattctaccggacagtacatggttattgacacatccaccagaaggaacctggagctggtggagaccatgcgggaaaaacagaagagaggcaccctgctgtgggttctggacaagacaaagacagccatgggagccaggctgcttcgcgcctgcatcgaacagccgctgattcacagggacgaaatcatcaagcgccagaacgcggtggaagagctgaacatgaactatatctcccgggaagagatatgcgagtacttaaatcccatctatgacctggagcgtctgatagggcgaatcagctataagacagccaatccaagggacttgattgccttcagaagctctctggaaatgcttccctatatcaaacggatactgggagagtttaacagcgaacttctggcagagctgggccgggagctggatccccttcaggatatcttccagcttataggggatgccattgtggaggagccgcccattacggtcagggaaggcggcatcataaaggacggctacaaccaggaggcggacaagctgcgccatgccaagacagaaggtaagaactggctggcggagctggaggcaaaggaaaaagaaaagacaggcattaagaccctgaaggtgaaattcaacaaggtattcggttactattttgaggtgaccaactccttcaaggaccaggtgccggattactatatccgcaagcagaccctgaccaacgcggagcggtttaccaccgatgaattaaagcagctggaagacatcatcatgggcgcggaggaaaagctggtgtccctggagtatgacctgttctgcgaggtcagggacaaaatcggggcagaggtcatccgcattcaaaagacggccaagtccatagctggaatcgacgtattctgttctctgtccgtggtggcaacccggcgcaactatgtgaagccctccatcaacgacaagggcgtgattcagattaagaacggccgccatcccgtggtggagcagatgatgcgggacgacatgtttgtggccaacgacacctttctggacaatggaaagaaccggctgtccgttatcaccggccccaacatggcgggtaaatccacgtacatgcgccaggtggccctgattgtgcttatggcccagctgggcagttttgtgccggcccaggaggctgatatcggcatatgcgaccgtattttcaccagggtgggggcttccgacgatctggccagcggacagagcactttcatggtggaaatgacagaggtggccaacatcctgcgcaatgccaccagaaacagtcttctggtactggatgaaatcggaaggggaaccagcacctttgacggattgtccattgcctgggctgtaatagaacacataagcaattccaagctattgggagccaagacactgtttgccacccattaccatgagctgacagagctggaaggcaccatagcaggggtgaaaaattattgtatagcggtaaaggagcagggagacgacatcgtattcctgcgcaagattgtccgaggcggtgcagataagagctacggcatccaggttgcaaagctggccggcgtgccggattccgttatagccagggcaaaagaaatcgcggaagaattaagcgatgcggacatcacggccagggcaaaggaaattgcggaaatcagttccaacataacccagcacaaggcggtgccgaagccggatgaggtggacctgcagcagctgtccttctttgatacggtaaaggatgacgatatcatacgtgagctggacagtctggagctgtccaccatgacgcctcttgatgccatgaacaccctgtaccgccttcagacaaagcttaaaaaccgctggaaggagaccggatgaattttcacatactgacactgttccccgacatggtcatgggaggactgggaaccagcataacggggcgggccatggagagcaagaccatatctgtggaagccattgacatcagggattattcaaaggataagcacagacatgtggacgacgccccttacggcggcggcgcaggcatggttatgcagccggggcctgtgtgcgaggcttacgaggccctgtgcgggcgcatcggcaggaagcccaggcttatctatatgacgccccagggcagggtatttaaccaaaccatagcggaggagctggcaaaggaggaggatctggtctttctctgcgggcattacgaaggaatcgacgagcgtgccctggagctgattgccacggattatctttccgtgggagattatgtcctcacaggcggggaacttcccgccatggttatgattgactgtatctcccgtctggtgcccggggttctgaacaacgacgcctcggctgaggaagaatccttccatgacagcctgttagaatacccccaatacacccgtcccgaggtattccgcggggtggaagtcccggaggtgcttttaagcggccaccataaaaatattgaggagtggcgcaggcagcaatccataaaacgcactctggagcgccgcccggacctgctggaacatgccgccctgaccatgaaggaggtaaaatacctggattccctccgccgggaaaaaggcgacctggaaatcctggaggagcttatagaccagtatgtaaaatccctgaacgatgaggcctctgccggccgcaccaaacgaaaggcaatggctgcggcaaagaaattgctggctgagaaggcttgtacggttggggagctgcaagggtactttaaagtgatggggatgcttgcggggggatgatgggcggagggggaggtgtttccggctgtgagaggaacgggggcggtgccggaggcgcccctttccgcgctgggagagactagggcccaagggccgggagaagatgagaatcgctccaaagtcacctccggcaccgcccccgttcctctcactccacaacgtatctccccaccagccgcatattttccccgcttcgcgcagatgagagccgcaggcgtaagatacgggcagcctaacaatgtcaatccccaaccgcattaaaaagaccagatagagatactggacgaaaaaacagcgtgcgctctttttatgagccggggagtgtcagcgggagagagaaagagtggccggaaaggcggcgggagggggcggggaggctgagcgaattttactgagggccgctgtctcttagccgggagcggaagcggagcagggggtgagggagggcgttcaacgcccgagcgaaagggaacaggtcggcgaactcatcaagagttcggcgaacttttcccgatccccctgcgcagcttccgttcccggcttagagacagcccccgaaggaaccatgagtccagactccccgtcccctcccgctgcttttcctcgataccccctttttttctctcccctgcccccaccccgcgaatccttccatattgacaatcccccaataatattgtacaattctctgaaactatccacataaatacacacattacaggccacggcccatacgttccgggcttttgggactgtaaaatatgaaataataggagttgatttttttggacccatcgggtgacagtattgccatacgtgtcgttatcattatcattttactgggactttccgcttttttctcgtcttcggagactgccctcacaaccgtcaataaaatccgtatcaggacattggcagaaggggggagcaagtctgcgcagtgggtgatgaagctgtctgagaatcagggaaagatgctcagtgccatattaatcggcaacaatgtggtgaatctttcggcctcatccatgcttaccgtgctggtgacggaaatatttggaaataaagccgctggagccgcgaccggcgtactgacgcttttaattttgatttttggtgagataacacctaaaacaatggcaaccctggatgcggagcggtattccctgcgggtaggccatatgattcatattctgatgactgtgctgacccctctgattgtccttattaactggatgtcgctgattgtcctcaaggttctccatgtggaccctgataagaggaatgacgacattacggaggacgagctcaggaccattgtggacgtgggccatgaaaaaggtgttattgagtcggaagaacgtgagatgatcaacaatgtgtttgacctgggagactccgtggcaaaggatgtcatggtgcccagaatcgacatggtgtttgttgacatagaggctgattatgatgatctgattcagatattcagagaggagcattataccaggcttcctgtctataaggaaacaacggacaatgtggtgggcatcatcaatattaaggacctgctgctggtggaggacaaggcgtccttctgcgtgtcggattacctgcgccagcctttttatacctttgaatctaaaaagctatccgagctgatgatggagattaagaagtctcccaacaatatcatcattgttctggatgagtacggcgccacggcaggtctgattaccctggaggatatcctggaagaaatcgtgggcgatatacgcgatgagtatgacgaggatgaggaagaggagctgatggatctgggagacggccagtatctggtggaaggttccatgaagctggatgacctcaatgacatcctggatttggaactgtcttctgaggactatgattctgtgggggggcttgtgattgaccgcctggaacatctgccttcccagggcgaagaggtggtgtgcggcaatgtgcgcctggtagtggaacaggtggaaaagaaccgtattgacaaggttcatctgtacatccttcccggagaaaaagaagaggaatagaaccaaggcgaaatcaaggcgaaacagctcataaaatgcttgcattttgggacaatatatgctagaataagtcgttgtgacaagaaatagatggtcctctgttactgtgagtggtgaatctgatttactgccggcgtattaagaacatccaatagatgaaggaggttcacacgatgaacgatattattaagaacattgaagcagcccagttgaaggaaagcgtacccagctttaacgttggcgataccgttaaggtatacaacaagattaaagagggtaaccgcgagagaatccagattttcgagggaactgtcattaagagacagaacggcggagccagagagacctttaccgtaaggaagaactccaatggtatcggcgttgagaagacctggccattacattccccaagcgttgacaacgtagaggttgtacgtaagggtaaagtaagaagagcgaagctgaactacttaagagacagggttggtaaggctgccaaggttaaagaattagttaaataatcaggtagtggaagtgagaatagagtttgcagatgcaaactctattttgttaagcaggcggcatacccgtaagcagtccgggaaatgccttaaaagataggtgtgggtacatggatttttatgtgaatgaggatacggcgtggctgagaaaagcagtccgctggacggtcaatgtggtgttggtcctggccagtgcctggttcctggtctacggtttctgtactcaggtgcctgtgtcaggcggttccatgcagccggttttagatgcggacgatgtggtcctggtgaaccgcctgatttatgatgtgggaaagccggaacggtttgacatcgtggtatttgagcgcgaggaccacaagaagaatgtgaagcggatcatcggtctgcctggtgagaccgtgcagattaagggcggctatatatttattgacggcgagcttttaaacgcggaggacggcctggaacaggtgtccctggcaggaagggcggacacccccattaagctggaggacaatgagtattttctcctgggagataacagggacagcagtgaggacagccgtttcccgaatattggaaatgtaaaaagagaacagatacagggcaaggtctggttcaggatatttccccttctgaaactggactttatccattcaagatagaacaggagtttacaaatatgaacattcagtggtatcctggtcatatgaccaaggcaaaacgggccatgaaggaagatatgaagcttattgacctggtaatcgagctggtagacgccagggttcccctttccagccggaatcctgacatagatgacctgggcgcgggcaaggccaggatggtgcttctcaacaaatcggacctggcggacgagcggcagaatgcccgctgggcagcctggtttgaggacaagggcattcacgtggtgaaggttgacgccaggaacaagggaacacttaagcaggtgcagtccgtcatccaggaggcatgtaaggaaaagatagaaagggaccggcgcaggggcattctgaaccgtcccatacgtaccatggtggtggggattcccaatgtgggcaagtccaccttcatcaattcctttgcaggaaaggcctgcgccaagaccggcaacaagcccggcgtcaccaagggaaaccagtggatacgcctgaataagacgctggagcttctggacacccccggaatcctgtggcccaggtttgaggatcagcaggtgggcctgaagctggctctcatcggctccatcaatgaccagattctcaacaaagatgagctggcctgcgagcttatacgctttttgaaaaagcgttatccccaggtgctggcagaacggtttggcctggaaacagagggaaaggaagctgccgttatcctggaggaaatagccagggtcagggcctgcctgttaaaaggcggggatctggatgtgtccagggcggcagccctgcttctggatgatttcagggcaggcaagctggggcggatcacgctggaggagccggagaatcaaaaggacaaggtggaatgacaatggctgcaagggtactaaagggagaaaagctggagcaggagatggcccgtctggaggccatggcggaatatgagaaggagtatgatgcctgcacctatatctgcggtattgatgaagcgggcaggggacccctggcaggaccggtggcagcaggagccgtagtgcttcccaagggatgccgtatcctgtatctcaatgattccaagaaactgtcggagaaacgccgcgaggaactgtttttagagataaaggaaaaggctgtagcatggaatgtgggcctggcaactcctgccaggattgacgagatcaatattcttcaggctacctatgaggccatgagggaggctgtgaaggggctttccgtgaagccggaagtgcttctcaacgacgctgtcaccattcccgggctggaaggggtgcaggtgcctattataaaaggggacgcaaagagcctgtccatagcggcagccagcatcctggcaaaggtcaccagggaccatatgatggctgagtacgaggaattatttcccggatatggatttgccaaacacaagggatacggcacggcggcccacattgctgccatcagagagcttgggccctgccctattcacaggagaagctttatcaggaatattgttcaggcggatacatatgaataagagacagacaggcagccgttatgaggaaacagcggctgcctttttaacaagtaagggttaccgcgtgctggagcggaatttccggtgccgccagggagaaattgatttgatttgccgccatggcaggtaccttgtttttgcagaggtaaaataccgctccgggctgtccatgggaagcccggcggaggctgttgacgcaaggaagcaggagcgcatacggcgggcagcggccttttatctgtacagccatggaatgggcggggacgtcccctgccggtttgacgtggtgggaatcctgggcagtgacattgagctgatacaggatgcattttgagtataaggaggcaatggtgttatggatataaactggagctataagaacaaatcccgcgtatttgatacaaaagaaagtgcaggcgttccctatctctcatttaaggcgctggatgaaaccgggctggccgtcaatggtttttccacccgcatgggcggagccagcaggggaaaattttccaccatgaatttctcttacagcagaggagacgtagcggaggatgtgctggaaaactttacgcgtatggcagccgccctgggagtggagcgggaccgcatggtggtgtcccaccagacccatacggtcaacctgcgccgggtgacgctggaggatgcgggaaagggtgttgtaagggaacgggattatagggacatcgacggtctgattaccgatgtgccggggcttaccctggtgaccttttatgcggactgtgtgcccctgtacctgttggatccggtaaacagggccattgggctcagccattccggatggaggggaacggttaagcgcatgggccaggtgacggtggatgccatgaaggaagccttcggcacaaagccggaggatatgattgcctgtgtgggtcccagcatctgccgggactgctttgaagtgggcggtgaagtggtggaggaatttagggaggcctttgggccggaacaccgggaagcgctgtattgccaaggaaaaaggcccggaaagtatcagctggatttgtggaaggccaatgaaatcattttccgcgaggcaggcatacgccaggagaatatccatatcactaacatctgcaccatgtgcaacagcgattatctcttttcacaccggaaagtgggggaggagcggggaaacctggcagcgtttctgtgccttaagtagcgtgaggtctgcgaaggagaaaggaagaggggcaatatggatgtattattggaggagtggtctcctgtatgcagcatacaggctgttgtggaggacaacggacaggcggtctatttctacctttgggtgaatcctggaagcgagaacgcagagattcgcaactgctggatctgcaaccgggttccggccatggaagatatggattatgaggccatgaagatgggaatggccccgcgtatgcccagggcatacgtgacccatgattctgcgggtatctgcctggacagggaaaaattgtccctggtctggtttgaggagggagacggtgcagccctgtatgaggacggcaggatgattgcggttattcctggctgggccggccgggaatttccgggatattccctatacgcaaagggtatggcgccctttgcctgggagcttcaggaggcgctgcctgttctggaacagcggatggagcgcagccggatgtactgggacattatggggggcggatattttgagaccatgcagcaggaacagctggctgccatggaagcattttttggtccccacaaaaagtattatgccattgacggaggcggatttccgccaaaggctctggtgacaggagaacgaaagggcagccagtatgcgtttacccttggaaacggggccctggcccagccaaaggtggaacagtattttcaggatgagacatggaaataccgccgcatggaactgggagtggcttttcccaagggatgcagccaggaaggcattatggccatgcttaactatacagcggcccaggcatccctgccatggaaggaactgggctggctgggacacggccataccattccctgcagcggagtggaaggctatgaaggtgttctgcttctgagccctggcctgtgcggcgtacaggaaggccctgcctatcccatgttcatggacgagcccgtgaacctgctgtggatgatgctgcttaccggcgaagagtatgaactggtaaaggaacaggggacggatcctattttggaaaagaagggcgcggacccggctgcctggaacctggtgtgaccatagagagaaacataaaaaatgcacagtcccttacggcgggcatttcgctgccgtggactgtgcatttttgaatattgattgccgggttaaattttctgcatggtggcagggggttatacaagcttctggaaatactcgtatccgccgttctgatgcttctggaccagcttctgaatcttctccgtgggagagagggaagcgctgatggagcggtcatggttcagggagttgatgacagcggccaggtatttgctcatgtcggcttccagataccattccctgttaagcagttcctgggtacggtaattcaggttggtagtgatgacataatccagatatccctgatggtagtactcgtcaaatttctcaaggccgttggtaaagagaccgaaggtgcagcagacgatgaccttgtcagccttgtgttcctttaactccttacaggtgtccagcatgctttcgccggaggaaatcatgtcgtcaataataagtacggttttgccttctacggaagagcccaggaattcatgcgccacaattggattgcggccgccaattacctgggaataatccctgcgtttatagaacatacccatatccacacccaggttgttggcaaggtatacggcgcggttcatggctccctcgtccggactgaccaccattaagtgttccttgtcaatgcggatgttggaatcatgggaaaagagggcctttacaaactgatacgtgggcatgaaattgtcaaagccaatcagcggaatggcgttctgtacccggggatcgtgggcgtcaaaggtgatgatgttttccatgcctaaggctgccagttcctctaaagccatggcgcagtccagagattcgcgtttgttgcgcttgtgctggcggctttcatataggaagggcatgaccacattgaccctgtgggcggttgcggagcaggccccgataatccgcttcaaatcctgaaaatggtcgtccggcgacatgtggttggtataaccgcttaccgtgtagggaatgctgtaattcatcacatccaccatgacaaaaacatctgtgccccttacggattcattgatgacagctttgccctcgcctgttccgaatctgggacagctgcagtgaagcagataggaatccacgtcgtacccgcggtagtgaaggtcctccttgcggcgcatcagttcctctatatcattgcgcctgaattgtacaatatggtcgttcaccttggctgcaagatccttacagctttccagtgcagcgatttttaaaggcgctacgggaagggaatctttgaatacaaaattgttagccatgatagctttgctcctttggaatcatcatttgtttgggaatatcacatatgatttataccatttccctttgaccgggtcaaggggttgatactatttcgtcaaaaaaacaagacaatttcacaaacgttttttagaaaattaactttgcatttacaaaaataagttatattgctatgatagaggttaataagaaagtgctttacaagtcaggtccggtatagtaaaatcaagcggatgcgaagaatttgtgttaaaggatatggattcagatgaaacctggaaagaacaaaaagaccagctgtgagtgctgcggcaattacgtatatgatgaggaaaatgattactatatctgtgaagtgaatctggacgaggatgagatggggcgctttttaagaggtactgttagcgcatgtccttattaccagtccgatgatgaataccggattgtgcgcaggcagatgtgacggaaggtcatgaatgaggaggttataaaaacatgagtaaaccaatagttgcaatcgtaggcaggcccaatgtgggaaagtctacgttgtttaatgtcatagcaggagataccatttccattgtaaaggacacgccgggcgtgaccagggaccggatttacgcggactgcgactggctgaatatgaatttcacgctgattgacaccggaggtatcgagccggattccaaggatatcatcctttcccagatgcgggagcaggcagagattgccatttctactgcggatgtgattatttttatcgtggatgtgcgtcagggactggtggattcggattcaaaggtggctgatttgctgcgcaaatcccacaagccggtggtgctggctgtgaacaaggtggacagcgttgccaagtacggcaatgacgtctacgagttttacaatctgggaatcggagagcctgtcgctgtatcggctgcttcgcggctgggaattggtgatctgctggacgaagtggtgaagcactttgactcggagcagatggaggaagaagaggacgagcgtccgagaatcgctgtggtaggcaagccgaatgtgggaaagtcttccattattaataagcttgtgggcgagaaccgcgtcattgtgtcggatatagcaggcactaccagggatgcggtggatacggaggttatccatgaaggcaccccttatgtattcatagatacggccggcctgcgccgcaagagcaagataaaggaagaactggagcgctacagcattatccgtaccgtgtccgccgtggaacgggccgatgtggtggttgtggtcatagacgccacggaaggcgtcacggagcaggatgccaagattgccggaatcgcccatgagagaggcaagggaatcattgtagccgtaaataaatgggatgctatcgagaaaacggacaagaccatatacgaatataccagaaaaatcaaggaggtcctgtccttcatcccatacgcggaatatctctttatatccgcggcaacaggacagcgtctgaccaagctttttgagatgattgacgtggtgcgccagaaccagaacctgagggtggccaccggcgttctcaacgaaatcatgacagaggcagtggccatgcagcagccgccttccgacaagggaaaacggcttaagatttactatatgacccaggtggcggtaaagcctccaacctttgtgatctttgtaaacgacaaggaactgatgcatttttcttataccaggtatctggagaaccagatcagaaatgccttcggctttaaagggacatccctaaaattccttgtcagggaacgaaaaggaaaagagcagtaggtgtaaggaaagggggattaaggagtggaacagattatatgtttggccatgggatatgtctttggtttattccagaccggtttcatttacggcaggtccaagggaattgatatacgccagcacggcagcggcaattcgggaagcaccaatgccctgcgcgttatgggagtaaaggcaggtctcattgtattcatgggtgatttcctgaaaacggtgataccctgcttcctggtaaggattcttttccggtcccagccggggtatatctatgtgctgatactctgtgcgggcttcggcgtcatactgggccataattttcctttttatcttaagtttaaaggcggtaaggggattgcggcaacagcaggcatcatgttttcgctggactggcggttgacagctgtctgcctgctggcctttgtgctcattgtggcggtaaccaggtatgtgtccctgggctccctggtggtgtccgctattttcctgtgctggaacatctatttcggccatttgggggcttacgggctggcgcccgaggccagaccccagttctacgctgtttccgcggtcatagcggccatggctttctggaggcacagggcgaatatcgtcagactggtacagggcagggagaacaaggtaggcgctaagaaaaagacagagtagtatacaaaggacagtaaaaaacaattaatggacggtgaggttatggcatcaatcggtgtaatcggatcaggcacatggggcacagccctgtcagttttacttaacggcaatggacatacggtacagatatggtccgccattccgcaggagatagcggaactaaaggagacacgtatccaccgcaatcttcctgaggtaaagatcccggaagcaatcgggcttacggatgaccttgaggaggctatgagggataaggaccttctggtactggctgttccctcggtttttgtgaggcagacatcacaaaggatgaagccctacataaagcagggccaggtgataacaaacgtggcaaagggaatcgaggagaagagcctcatgaccctgtcccagattattgaggaggagctgccggaggctgaggtgacggtcctttcagggcccagccatgcggaggaagtgagcaggggcctccccaccacatgtgtggccggcgcccataagcgcagcgtggctgaatttgtccagggaatcttcatgagcgaggtattccgcgtgtataccagccctgatgtgctgggaattgagctgggaggcgcccttaagaatgtgattgccctggccgccggtatggccgacggtctgggatacggcgacaacaccaaggctgccctcattaccaggggaatcgcggagatatcccgcctgggcattgacatgggcggacggatggagacatttgccggacttacaggcataggggatttgattgtgacctgcgccagcatgcacagccgcaaccgcagggcaggcatcctgattggccggggctataccatggaggaagccatggcagaggtaaagatggtggtggagggtgtgtattccgccaaggcggctctggcgctgtcgcagcagtacaaggtgtccatgccgattgtggaacaggtcaatgccatcctgttcggaggcatgcctgcaaaggaagcggttctggagctgatgctcagggataagcgtatcgaaaactcggatttggagtggtcggaagaataaaaaataggggaagggaaccagaaatggtgccttcccctaaaaaatagcctgtttttggcggattatacctgctttggctctaatttttcggtatatcgtcgaaaataaaccataattttcatgaaacgattgacaaacccattcggactacctataatatagaaagctttatattttaaaggcaagaggaggaactaattatgaagaagagatttttaagtctgggcctggcagccgttatggctatgtcattgacagcatgcggcggttccaatacggcagagaccacaaaagcagcagagactactgcggcagatgcaaaagcagagggaagcgaggcagcagataccgcagcagctgatgcaggtgcggcaggcggcgtgttcaagattggcggcatcggccctgtaaccggcggtgcggctgtgtacggcgtggctgtacagcacggcgcagagctggcagtaaaggaaatcaatgaggccggaggaataaacggcgcacagattgaattcaacttccaggacgacgagcatgacgcagagaagtctgtcaatgcttataatacattaaaggactggggtatgcaggtgctgatgggcacggttacctccgctccatgtatcgcagttgcagataagacagcagctgacaacatgttccagattacaccatccggttccgctgtagagtgtgcggctaaccccaacgtattccgtatctgcttctccgatccggaccagggcgctgcatccgctaagtacataggcgagaacaagctggcttcaaaggttgctgttatctatgacagctccgacgtatattccagcggtatctatgagaagttcgcggaagagtccgcaaaccagggtattgagattgttgcagccgaggcatttaccgctgacagcaacaaggatttctccacccagttacagaaggccaaggatgcaggcgctgagctggtgttcctgccaatttactataccgaggcttccctgatccttcagcaggccagcaccatgggctttgcaccgcagttcttcggatgcgacggcatggacggtatccttcaggttcagaactttgacaccaagctggcagagggacttatgctcctgacaccattcgcggcagatgctaccgatgacctgaccgttaagtttgttgagagctacaaggctgcttacaacgaggttccggtacagtttgcagcagatgcatacgatgcaatctacgctatcaaggctgctattgaggacgccaatgtaactcctgatgcagacgccagcacgatttgtgacgcgttaaaggcatccatgctgaatatcaaattagacggcctgaccggcgagggcatgacctggactgaggacggcgagcctcacaaggcgcctaaggctgttaaggtagtggacggagcttactctgcaatgtaatctgccgccttttaaatccggccagaaccaaccagaaaacccaacagagggttgtcactatgacaaccctcttgtttatagtaacgatatatgatataattttgaataatctgtcgctttatagcgataaactaaaaaagacttcagacgaagaggtgtaggtatgggctttattaactatttaattaacggcatcagcctgggcagtgtatatgccatcatcgcacttggatatacaatggtttacggcattgccaagatgctgaatttcgctcatggcgatgttattatgataggcagctacgtggtatttgtcacggtcagcacaatgggactgccgcccatggcgggagtgctccttgcggtggccgtatgtacgctgttgggcatgaccattgaacggattgcttataagcccctgcgcggcgcctctccccttgcggttctcattacggcaatcggcgtcagctacctgctgcagaacgttgcccttcttatctttggagcagataccaaatccttcacctccgtggtgaccctgcctgccatcaaactggcgggaggagagatgaccattacaggggagaccattgtcaccatcctttcctgtatcgtcatcatgattggactcactgcctttatcaacaagtccaaggccggacaggccatgctggcggtttccgaggacaggggggcggctacccttatgggaatcaatgtaaacggcaccattgcccttacatttgccatcggttccgcgctggcggccatagcgggcgtgctgctctgctccgcttacccgtcccttacaccttatactggttccatgccgggtatcaaggcctttgttgcggctgtattcggaggaatcggatccattccgggtgctttcatcggcggtatcctgctgggtgtcattgagattctgtccaaggcatacatatcctcacagatgtcagatgccattgtgttttccgtcctgattatcgtgcttctggtgaagcctaccggtattctgggcaagaagattaatgagaaagtgtaggtgccggtatgaagagcaacgcaaaacgaaagacattcataaataatatgattacatacggcatggtggtggctgcctataccatcatgcaggtcctggtgggaacagggcatatatccagccttatgaagggacttcttgttcctttctgcatctacgtaatcatggctgtgtccctgaacctgaccgtgggtatcctgggagagctgagtctgggacacgcaggctttatgtgcgtgggagcctttgccggcgccctgttttcaaagtgcatgaagggagccattgacccgactcttggaatggtcatcgccatcctcatcggagccgttacagcggccctgttcggcgtcattatcggaatcccggtgctgcgcctgagaggtgattatctggctattgtgaccctggcctttggtgaaattatcaagaacctggtcaatgctgtttatctgggacgggacgcttccggcttccatatctcctttaaggattccatgtccttaaagctgggagagggcggggaaatcctgataaagggcgcccagggcattacgggaacgccccaggcagccacctttaccataggtgttatcctggtgcttatcaccctgttcattgtcatgaatctggtgaactcccgcacaggccgtgccatcatggctatccgggacaaccgcattgcagcggagtccatcggcatcaatatcaccaagtacaagctgctggcattttccatttccgctggacttgcaggtattgccggtgtgctgtatgcccacaatctgaccaccctgacagccctgcccaagaacttcggatacaacatgtccatcatgattctggtgtacgtggtactgggcggtatcggaaacatccgcggttccgtcattgcgacggtcatcctgtatctccttccggagatgctgcgcggactcagcaattaccgtatgcttatgtacgcaatcgtgctgattctggccatgctgttcaactccgcaccccagtttgtggtgatgcgtgaacgtttggcggaaaaattcagcagaaaagataagaaacccgcaaaggaggcagcataagatggcattacttgaagttaagaatttaagcatatcttttggcggccttaaggcagttgataattttcaaatcagcatagaaaagggacagctttacggtctcatcggtcccaacggagccggtaagaccactattttcaatctgctgacaggcgtatataagccggatgcaggaagcattgagctggcaggagtcaacattaccggcaggaaaaccacggaaataaaccaggccggtattgccaggaccttccagaacatccgtctgtttaaggatttgtcggtgctggacaatgtgaaggcaggtcttcacaatcattacaggtattccaccacagccggaattttccgttttcccaactattttaaggtggagaagcaaatggacgagagagccatggagctgctcaaggtattcggactggacgaagagtgcgactacaaagcctccaacctcccctacggaaagcagagaaagctggagatagccagggccctggccacggagccaaagctccttctcctggatgagccggcagcgggaatgaatccaaatgagacagccgagcttatggataccatccgttttgtgagggataatttcgatatgaccatccttctgattgaacatgatatgaagcttgtaagcggtatctgcgaagaactgaccgttctcaacttcggacaggtcctgtgccagggcgagaccggcgcagtgcttcacaatccggaagttgtcaaagcatatcttggtgaataggaggagcgtataatatggctatgcttgaagtcagggacctggaagtatactacggtgtaatccaggccataaaaggaatctcctttgatgtgaaccagggagaaatcgtggctctgataggtgccaacggtgcgggaaagaccacaaccctgcacaccatcaccgggcttatcagcgcgaagacaggaaaaatcgtatatgagggaaccgacataaccagggttcccggctataaactggtgggcatgggaatcgcccatgtgccggaaggaaggcgggtgttcgccacccttacggtgctgcagaatctgaaaatgggggcttatacaagaaaagacaaggaagagatagaagccactctgaagatgatataccagcgtttcccgcgtctggaggagcgcaagaaccagcttgcaggcaccctgtccggcggcgagcagcagatgcttgccatgggaagggctcttatgagccaccccaggatgattgttatggatgagccctccatgggactttcaccaatctatgtaaatgagatttttgatatcatccagaagataaacggggatgggactaccgtgcttcttgtggaacagaacgcaaagaaggctctttccattgcgcataaggcctatgtactggagacgggcaatgttgctctcagcggagacgcaaaggagcttatgaacaatgatcaggtaaaaaaggcttatctcagcgaataaaggtaataatagtccactggcaggaagaattatgtaaaaatgaatcatggatatgagaaaggagcaggggcggataacccctgcttcgttccttgacacccctggtaagatatgctatatataatgtacggcgaagacggcctgattttatctgttgattttgcgtgaatagacctgatacatggtgattttgtaccagtcatatactcatacccccctgcatatactataaaagcatagcaagggggtatatttatggacaattttaatgtatacaaggatattcaggcgagaacaggcggagagatttacataggcgtagtagggccggtccgcacaggcaaatctaccttcataaagcggttcatggagctgctggtgctccctgcaatggaggatgagaacctgcgcaacctgagccgggatgagctgcctcaaagcgcggccggcaagaccatcatgaccacggagcccaagtttattcctaaagaagcggccagcattaatctggcagacggtattgaagccaaggtaagggtcatagactgcgtgggattcatggtagacggggcagcgggtcatgtggaaaacggcgaggagcgactggtgaagacgccgtggtttgattatgacattccgtttacccaggctgcggaaatcggaaccagaaaagttatcaatgatcattccaccattggaatcgttgtgaccacagacggcaccattggggaaattaaacgccccggatacatagcagctgaaaagcagaccattgacgagctgaaaaagctgggcaaaccatttgtggtacttttaaattccaccaaaccctattccgacgaaactgccaggctggcaagggaaatgtctgaatcatatggggtatcggtgctgcctgtaaactgcgagcagctcaagaaggaggatgttttccatatcctggagcgcgtcctgaaggagtttccggtgactgagatggatttccatattcccaaatggctggagatcctgccttccacccattggcttaaggcccaggtgatccaggcggccaggaatgtaatccagaaagtaacacacatgaaggatgtgtccggggaactggaacagcagcatacggataccatacgatccatgaatgtcaaaaatatgcagatggcggacggcagggtgggtgtccaggtggatatggatgacagctactattaccagattctcagcgactatgtgggactgcccattgaaggggagtaccagctcatgcagaccttgagcagcctggctaatatgcagaaggaatatgaaaaagtgcagaacgctctgacccaggtgcggttaaagggatatggggtggtgacaccggaacgctcggaaatcgtgctggatgaaccgcaggtcatcaaacacggcaacaagtacggggtgaagatgaaagcggaagcaccgtccatcaacctgattaaggcccatatcgagacagagatcgctccgattgtgggaagcgagcagcaggcccaggatctgattgcctatatcaaggaaaatgccagggagagcgacgacggaatctggaataccaatattttcggaaaatccattgaacagattgtggaggacggtatccaggccaaggtgtcccagatgacggaggactgccagctgaagctgcaggatactctgcagaaaattatcaatgacagcaatggcggtatgatatgcattattatttaaaatcagcaataatagaatgcgtgttgggagaaggacgattctcagaaaattgtgcaaatattgcaatacgatttgcattcttatggggaatatgatatactgtagccataattgacagaatattctgtggggcaagactatattatactcagaggggagaatgcagatgagacttacatttatcggggccgaccatgaggtaacgggcagctgtcattttctggaggtgggaaataccaaggtgcttatagactgcggtatggaacaaggaaataacatataccagaatgcggagctgcccgtggggtatcatgaaattgactatgtgcttctgacgcacgcgcatattgaccatgcaggcatgcttccgtggattcatgccaggggattcagaggccaggttatcaccacctatgcaaccgccgacctgtgcagcatcatgcttaaggacagcgcccacatacaggagatggaagctgagtggaaaaaccggaaagcgcgacgtgcaggccggggcgaggtggaagccctctataccatgcaggatgctgaggatgtgcttaagcattttgaaggtgtggcttatgggcaggtatttaagctcaatgacaatctgaccctgcgttttacggatgtgggacatttgctgggttctgcctccattgagatatgggccactgagggcgccagcaagaaaaaaattgtattttccggcgacattgggaataagaataagcctctgatccgtgatccccagtatattacggaggcggattatgttgttatggaatccacctacggaaaccgctatcataaaaaggatgtaaaccatgtggacagtctggccagaatcatacaggagactctggaccggcagggcaacgtggtcataccggcctttgcagtgggacgtacccaggagttattgtatctgatacgccatattaaggaagaaaggcttgtggccggccatgacagcttcgaggtctatgtagacagccctctggccgtggaagccacccatgtgtttaaggacaatatgctggagtgctatgacgaggagacaaaagccctggtggaacgcggaatcaaccccattgattttccgggactgaagctctccattaccagtgaggaatccaagaacataaactttgacatgacgcccaaggtcatcatatcagcggcaggcatgtgtgatgcgggccgtatacgccaccatctgaaacataacctgtggaggccggagtgctccgttgtgttcgcgggataccaggccgagggaaccctgggacggattctgcaggacggggctcagaccgtgaagatattcggtgaggaaattgatgtgcgggctcatatagaaaccatggatggaatcagcggccatgcggacagggacgggcttatcagctggatatccgcgtttgagaaaaagccggattatgtttttgtggttcacggaagcgaggaatcctgcgtatccttctcggatgtgctgaatacccagctgaaactcacagccagggcgcctttttcaggttcccagtttgaccttataaagggcttctggattaaagagacagagggcgttctcattgagaaggaaactgccgccaaacgcagggccatcggtgtttataccaggctggtggatgctggcaagatgctgttggatgtgattcaccgcaacgagggcggcgctaataaggacctgacccgttttacggaacagattcttgccctgtgcgataaatgggacagatagaatgttactgacaggagatattgacacatgacgaaggtacagatttacacagacggttctgccaggggaaatcctgacggtccgggcggttacgggacagtgcttcattttacggacagcagcggccagcttcatgagaggaccatgtccggcgggtatgtacgcaccactaacaaccggatggaactgatggctgctattgtagggctggaggcattaaacaggccatgccaggtggaattatattcggattccaaatacctgacagacgcatttaaccagcattggattgacagctgggtggcaaagggatggaaccgcgggaaaagcgggccggtaaagaatatcgacctctggaaacgcctgttaaaggcaaaggaaccccaccaggtgaaattcatctgggtaaaaggacatgcaggccatcctgaaaatgagaaatgcgatgctctggccacctctgcggcagatggtgggaatctgatgacagatcaggggctggaggcataaataagctttaccctgatgcagtttaaaagcagaaggcgctgcttaaccctggattacatggaaaaaaggggatgcagcgctttttttgcatttgtatctgttcctgattttcttacatatctcttacaatctattactccttttatcttcgtgtttcttttcttccttttttgtgataaggtaaatacaagattatggcagggatgtgttgcgatgaaagataaacggatatggattgtgattggctgtatcctgttcataggaactggtgttacccactataccaaatactatgtgaacagccagggggcggccatgatggctgagattacagcaggggcagaagacacggcggcagcgccttcctttgccccggctttgggacagcaggatacagaggcaggcggaacggatacaggtatggcggcggcaggcagggcagcacccgcaacacctgcggaacgcaggatgacgggagatgcagggccggggaatacagcttcgggaaacacggcatcaggagatgcaggccttgcaagcgcagctccgaaaggtgcagattccggagatgcagcatacgcaaaggctcctgcagcaaaggcggcagcagagcccttttcgtccggccaggcagctcctgcaatggcggatgccgctggggaaacaatggcttcggatactgcgggtggcgccggtgagggggccgctgcttcggaagagaatatgcctatttcccctctcacaggatccaggaccagggaatataaggtgagtctcatagtagactaccgcaaacgcctggaagatttggatacccagattcttaagatgcgggaggaggaaacggactccaatgtatattccatcaagacctcggcggaaacagaacttaagctgtgggaaggtgaactgaattccatttacaatgcgcttatggagatgctgtcccaggaggacgctgcaaagctggcttctgagcagcaggaatggcttaagaaccgggatgccagggcggcggagagttcaggcaggaacagcggatctatggagggaatcagctatgcggccacattggccagtctgaccagggacagggcttatgaactggcaggacgctatgaggaagccaacggggtgttctatgaagaggaggattcttctcaaccggcatcgccgtaacaggagaaaatatggaaagaacggtccgtatgaccggaatcaagaattgcgggaaagagggaaaaacaatggaaaatcattggttttccctctcttttttgttaagacggtcttgataattatatagcgttatggtaaaatgacggttatgtaattagagcaatgatatggaggaaaataaagtgaaagaaccacagtaccgcggcgtgaacgagctgcgccggatgttccttgaatttttcgagagcaagggccatctggcaatgaaaagcttttcactggtgccgcataatgataacagcctgcttttaatcaattccggtatggctcccctgaagccatatttcacaggacaggagattccgcccaggaacagggttaccacctgccagaagtgtatccgcaccggcgacattgagaatataggaaagacagcccgtcacggcaccttcttcgagatgctgggtaatttctcttttggggattattttaaaacagaagccatccactggacatgggaatttctgaccgatgtggtgggactggacccggacaggctgtatcccagcgtgtacctggatgatgatgaggccttcggcatctggaacaaggaaatcgggattccggctgagcgtattttcaagttcggcaaggaggacaatttctgggagcacggttcaggcccctgcggtccctgttcagaggtatattacgacagaggcgaggcctttggctgcggaaagcccggatgcacggtgggctgcgactgcgaccgctatattgaggtatggaacaatgtatttacccagtttgataatgacggacatggccattatacagagctggagcataagaatattgatacgggcatggggctggagcgtctggctgtggtggttcagggcgttgactccctgtttaccgttgacaccaacaaagcgcttttggacagggtgtgccagcttgcgcatacagaataccagaaggaccatgagacagatgtgtctctgcgtattgtcacagaccacgtcaagtcctgtaccttcatgatttcagacggaatcatgccttccaatgagggaaggggctatgtgctccgccgccttctgcgccgtgctgcccgtcatgggagaaagctggggattgaaggcaggttcctggccggtctttctgagaccgtaatcgagctgtccaaggacggctatcctgagctggaagaaaagcaggccatgatattcaaggtactgtctgaggaagaggaaaagttcaacaagaccattgaccagggactgagcatcctgggtgagatgcaggatgaaatgcagaaaaccgggaacaagtgtctttccggagccaatgcattcaaactgtatgatacttatggattccctctggatctaaccaaggaaattttggaagagagaggctgcaccgtggatgaagacggctttgccgccgccatgaaggaacagaaggaaaaggccagaaaggcccgcaagactaccaattacatgggtgcggacgtgactgtataccagtccatcgatccttctgttaccactgaatttattggttatgacaggctgacggctgattccagggtgacggtcctgaccacggaagaagagctggtacaggcccttacagacggacagaagggtaccatcatcgtggagcagaccccgttctacggaaccatgggcggccagcagggagatacaggtgttatctccaatgaaaacggcgcctttaaggttgaagacaccatacaccttcagggcggcaaggtaggccatgtgggcgttatgacaaaaggcatgttccaggtgggagaaaacgtgactctgtctgtatgtgcccacaaccgcgctcttacctgcaaaaaccacagcgccacccatctgcttcagaaggctctgcgcaaggtattgggagaccatgtggagcaggctggttcctacgtggacgctggcaggctgcgttttgactttacccatttttcagccatgacaccggatgagattaagaaggtggaggaactggtgaaccaggaaatccaggcatcccttccggtcgtcacccaggttatgacactggaggaagccaagaaaacaggagccatggctctgttcggtgaaaaatacggagataaggtgcgcgtggtgcgcatgggagatttctccacggagctctgcggcggcacccatgtgccgaatacaggcaccattgcatattttaagattatttccgaggctggtattgccgccggtgtaaggcgtattgaggcgcttacatccgaggggcttatgaaacattatcaggaggtggaagaggagcttcaggaggcggccaggacagccaagacaacaccgtccgcgctgacttccaagatacagtcccttctggaggagattaagacccttcactccgagaatgagaagcttaagagcaaacttgccaatgactccctgggagatgttatgagccaggtcaaggaagtaaacggacttaaggttctggcagccagggtggccggagtggacatgaacggcatgagaaacttaggcgaccagttaaaggacaagctgggagaaggcgtcattgtactggcctgcgagcaggacggcaaggtaaaccttatggctacagccacagattccgcccagaaaaagggcgcccacgcaggcaacctgattaaagccatagctggtcttgtgggcggcggcggcggcggccgtcccaacatggcccaggccggcggcaaaaatccggcaggtatcgacgatgctcttaaaaaagcggttgagacagtggaagaacagacaaaatagtacatgtgcagataaaatttaaaaataaatgtaagaattataaaaaaattcttgacgtacggtatttttatgctataatcatagcagtgctaaaaatacccaaacagttgtattatgcacaattacacaactggagggaggttaggtgtgagcgatgtcaaacgtaattgttaaagataacgagagcttagacagtgctttacgcagattcaaaagaaactgtgcaaaggctggcattcagcaggaaattcgtaagagagagcattacgagaagccaagcgtaagacgtaagaaaaagtctgaagctgctcgtaagcgtaagtacaactaattcactggttggattaggtgttaatgtagtggaaaatcaactggctgtcataagtgattatggcaggcagttgtttttttgcttttttcggatttatatacctggcggaagagatgcacagtctgcggagaggggaggcgggggtgcggggcttgtattgctttacatccaacacaacccctgcagcctcaagcctcccctctccgcagacgtaccgtactctcgttcacgacactataaatccaaatcactccacttcattcaacccgcactccggcgatgccaccaaagagtaattggtatggtaaatcacgaatccgggtgcggctccggctacctttttaatgttctttttctggatatagtcgatttccaccttgtcattgtcacggcctttggaatagtaggcggccagggaaccggcttcttcaaagaggcggtcgggaaggtcggcgcggccctcagtttttacgatgacatgggatccgggaatgccttttgcgtggaaccaccagtcgtttcctgtggccagcttgaaggtgagttcctcattctggtagttgttctttcccacgtaaatgtggaagccgtcggaagaaatgtagtggaagggcttgctggtgattttcggctttttgtcgctggaacggcgctttttgatatacccgtattccatcagctcttccttaatctgcaccaggtcgttttcggccagggctatgtccagggcggagctgatggattccagatggtcgatttcagccttggtctcctttgtcaggtctgtcagggcttcataggtgcgctttaatttgttgtatttgtcaaagtgctttttggcattgtcctttgctgacagctgcgtgtccaggggaatggtgatttcctcattggtgtagtagttaaggcaggtaaaggatttctcgccgccggtgagctcatagccgtaggtgttcaggagttcgccgtatatgcggtatttttcacgtttttcagtgtctttcagctgttttagctgtaaatcgtattttttgttgttgcgctccagggctgtctggacgatccggcgaaggtctgaagacttttgacggattctggtgagggtgtcccgggaagcatagtactcctccagcagatggctcatggaccggaaggactggctgcggtaaacgccgccttcgtaacaggtcaggggcagggcagcgtattctgccgggccttcttcatcaaagacaatggcaggagcaaagcgcccttcctttacatcctccatcaccagggaaaaagtgtggtaaaggtgcagaagttctgtttcagacaattcagaggcgccgtaatccgaatcaatgcttgccaggtggcatatttcctcagccataatggggctgatgcctgtgagatggttgtacagggctttctggatggacatggaggaggatcctactgtctggcggaaggtttcctctgtgaccgaaagaggattttccttggcaacggtctgggggatgaaataggttcgtcccggcagcacctcgcggacagagctgacctgagcggacacatgcttgatgctgtcgatgatggtgccgtcctccttgcagaaaatgatgttgctgtgttttcccatgatttccacaatcagttttttgcggcacaggtcccccatctcgtctaagtgctccagttcgaactggatgatgcgctctaagccgggctggctgatgtccacgattctggcgctgcctatgtgcttgcgcagcagcatgcagaaattaggcgctgtcatgggactgggtttgtttttgtccgtcagatagataagggggaggcttgcgctggccgatatctggaggcggtaattttccctgttatttttaatggctatgagaagctcgtccttttcgggctgggcgattttagatatgcgtccgcccccaagggcttccttgaactcatgaaccaggtttgctatggtaatgccgtcaaatgccatatgatatatacactcctgtcgggcctgtattaacgcgggaaatgctgtttggacagggaaaggggatgaaccggaaggttccctgcttcggggcatgtccgggcgctgtggccgctgaatataagaataccataatttgacggaatagaaaaggccctgcatttgaagcgccccgttaattgcttcactggaaattgggttagccggcggaaattgttttgctgaacaagcggaaattgctttgttgaacaatttgttgacttgattccccagatgaattataatactaactaactatggataaaagcgaaagagaggcattcgttatgttaaaaagcatgactggtttcggcagatgcgagaatgtgacggacgagtacaagatttctgtcgagatgaaggccgttaatcacagatatctggatttaagtattaagatgcccaagaagttcaattattttgaagcttccatccggacactccttaagaaatatatccagaggggaaaagtggatttgttcatcaactacgaggattacacagaaggcaatatgtgccttaagtacaaccgggcgctggctgctgaatatatggagtactttaacaggatgtcggatgagtttggcattcagaatgatgtgaaggtgtcggccctggccaagtttcctgaggtgcttaccatggagcaggtgccggacgacgaggagcatctgtgggaaatcctttcagaagcccttaaggaggccgctgtcaagtttgtggagtcgagggagatagagggagaacatcttaagaaggaccttttaggcaaactggattatatggaaacgctggtggattttatcgaagagcgctccccccagattttaacagagtacagaaaccggctggaggacaaggtaaaggagcttttaagcaacacagccatggaggagagccgtattgcggcagaagttaccatctatgcggataagatatgtgtggatgaggagacggtgcgtctcagaagccatatacacaacaccagaaatgagcttttaagcggagagagcgttggccgcaagctggatttcattgcccaggagatgaaccgggaggccaataccatcctgtccaagtccacggacctgtccatctcggacaaggccattgcccttaagaccgagatcgaaaaggtcagggagcagatacagaatattgaataggaacatccaaataagtacattgaaaagtcagggagagcataccatgaaccagcagggaattttagtggtagtatccggattctccggagcaggaaagggaacactcatgaaagagctgctaaagcggtatgacaattatgcattgtccgtatccgccaccacaaggcagcccagggaaggagaaaaggacggggaggattattttttcgtcaacagggaatattttcagcagatgattgaggaagggcgtctggtggagtacgctcagtacgtgaaccattactacggcacgcccagggattatgtggagaagaagatggcagagggaaaggacgtgattctggagattgagattcagggcgcccttaaggtgaagaagcgttttcccgatgcgctgctgattttcgtgacgccgcccagtgccggggagcttcgccgccgtctggtaggcaggggaacagagaccattgaggtcatcaatgccaggctccgccgtgccgctgaggaggcgtcgggtatggaagcctatgattacctgctgattaacgacgagattgatgcctgtgtggagcagatgcatcagcttatcactctgcagcacagtaagacctgctatcatttggacttcctgagcaggatgcgggaagaactttaccacctggatgacagacagtaaaccatttataaaaatcatataacaattttgaaaggggaatgtaatatgttacatccatcatacaccgatttaatcaacgtagtaaacagcgatattgagccaggggaacagccggtggtacagagccgttattccatcgtcattgcggcttccagacgcgccagacagcttattgcgggggaggaccccatggttgccggagcagcaggaaagaaacctctgtccattgccattgatgaactgtatcaccagaaggtaaaaatccttccggaggaagagacaacggaagaggaagagcagaacgcataaatcataagccgtctcctgtacagggaagcattctgggtcatttccggtgctgcctggacagagatggcttaaatgttcattaggagttattttcatatggagaatataaagttattttgcgtatcccttggatgcgataagaatctggtggatacagagaagatgctgggactgttaaacggacggggcatcacgtttacggacgacgagacagaggcggatgtgatactggtcaatacctgctgctttatcggagatgccaaggaggaaagtgtcaacaccatcctggacatggcccggtataaggaggagggtaacttaaaggcccttctggtggcaggatgcctggcccagagatataagcaggaaattctggatgagatacctgaggtggacgccatccttgggaccacttcctatgaggaggtggcaaaggtgctggatgaggtgctggcaggaagaacgggtacccatctttcctgttttcacgatttgagcgagcttccccagacggaagtcagacgtgtggttaccaccggcggccattatgcctttcttaaaatcgcggagggttgtgacaagcgctgcacctattgtatcatcccttatttaaggggcccctaccgcagcgttcccattgagcagctggtgaaggaggccaggcagctggcggaagcaggcgtaaaagagctgattctggtggcgcaggaaaccactctctacggcagggacctttacggggagaaatgtcttccgagacttctgagggagctggcaaagattccgggtatctactggattcgcattcagtactgctatccggaggaaatcacagatgagcttatagagaccatccggacagaggaaaaggtgtgcaactacctggatatacccatccagcatgccagcgaccggattcttaagcgcatgggacgcaggaccaacaaggaagagctgatggagcgcatcggaaaactcaggcaggagattccggatattgccatccggactaccctgatttcgggctttccgggagagaccgagagcgaccatgaggagctgatggactttgtcaatgagatggagtttgagcgtctgggtgtatttgcttattccgctgaggaggatacaccggccttttcctatcccgaccaggtgccggaggaggtgaaggaggagcgcagggacgaaatcatggagctgcagcaggacattgcatttgaacactgtgagaatatggtaggcagggtgcttacggttctcatagaaggaaaggtggtggatgagcctgcctacgtgggacggacttacatggacgcgccgaatgtggacggtctgatatttgtgaacggggatgtggaactgatgtcaggcgactttgtgagggttaaggtaacaggagccgctgaatatgatttgataggagaggtgtatgatgaatctgcccaataaactgacgattataagagtgtgtttgatcccattttttgttgcggccctgctgtttgaccacggtaataactataccatgcgtattgtggcgaatgttctgttcattgtggccagtctcacggatctgtttgacggcaagattgccaggaagtataacctggtgaccaattttggtaaatttatggacccgctggcagacaagcttctggtttgttccgcgctgatttgcctgattgagctgggacagcttccggcctgggttgtcatcatcatcatcagccgtgaattcatcatcagcggattccgtctggtggcagcagataacggtgtggtcattgcagccagctactggggcaaatttaagaccactttccagatggcggctgtcattctgatgatttttaatattccggccctgacgctggtgacaaacattgtggttgtcattgcggttgccctgaccatcatatccctggtggactatgtggcaaagaatatcaaaatcctgacagagggaggcatgtagcatgactgtggaactcatatccgtggggactgagatacttatgggaaatattgtaaacagcaacacccagttcctggcggagaaatgcgccatgcttggtttcgatctgtttttccaggtcacggtgggggataattatgacaggatgatgtccgtggtgcgccaggcgctatcacgctcggacattctcatactgacaggaggcctgggccccacagaggatgatttgacaaaagaggtatgtgccgacgcattcggcatgcctctggtggaggatgcccataccagggagcatctgaaagaattcttcaggaataacatttacaggcacataccggacaacaactggaagatggccacagtcccccagggggcgctggtgctggacaatgccaacggcatggccccgggcctgatactggaaaaggagggcaagaccgctatcctgcttccgggacctcccaatgaactgtatcccatgttcagcaggcaggtgtttccttatctccagcaaaagcagaacgcagtgctggtatccagtatggttaaaatctgcggatacggagaaagccaggtagaagatatgatcctggacctgattgacgcccagaccaatcccaccattgccacctacgccaagacggcagaggtacatttaaggattacggccagggcgggaagccgggaggagggtatggccctcattgcgcctgtggaaaaggaaataaagaaccgctttaaggacgctgtctataccaccgaggaacaggtgagcctggagatggcggtggcggatttgctaaaacagaatcatctgaccatgtgcactgccgagtcctgtaccggaggcatgatagcggccagaatggtcaatgtgcccggtgtatccggcgtgtttatggaaggtatggtgacatattcaaatgaagccaaaatgcgccttctgggagtgcgtgaggacacgctgaaagcttacggcgctgtcagtgaagaaactgccagggaaatggcggagggcggagtgaataccagcggtaccgacctctgtgtggccactacgggtatagcaggacctgacggcggcacggatgaaaagcctgtggggctggtgtacatggcctgctgcctgaggggaaaaacctgcgtcaggagataccagtttaagggcaaccgggaaaaggtgcgggaacaggctatgatgaaggcactggatctggcgcgtctttgcatactggctaataaataaataccaggcggatatagcatccttgcttattgcgtgaaaataagttccgggaggaattgggtttggaatcaagacgaaggaagaaacagatttcagcggcctgccactatgcatatacacggctggccctgaattactatatgtactacgaggtaatcctggaaggagaccttttaagcagcaggctggagaggctgagcaaacgataccacggtctgctgaaggatttcctggagggaagcctgaagccggaggagctgaatggcttaagggatgagactgcctcggccatggaggccaataccgcttatacggatgcttttcaggcgtatgagtacgttctgaaccgtctggaaggacgttttgagccccagctcatgggaaacagaaatgtccagccagatgaggaagaatggacagcggaaattatggcctatatcacggacacagatgaggcgatggttgtcaatgaacggatacagtccgtggtgggccagcttcccatacggcttaccaggaataaattctttgccatggtggaggaggggctgtctgtctataagggcggtccggtctccagcctggatgatatgctgtatatcctgaggtccgaggccatgctggcgcggccggaggacatggagacaggatacgaggatcttcactccattctcagggaatttgaaagggcggattttaaggccgtcacagcagaggaataccggcatctgacagccgagatggagcgggcaggacagattctcctggataccacgggggaactgatgctgtttatggatttgatcaatgacctttatgtgcttatgctttccagaagatgggcgatgatggaggtatcagaggaaagcctgttacaagagctgctgtcaaaggtccagtctctttttgaggaaggggccgtaacggccattccgcaggagctgacagataagctgtccatgctggagggaaagcaggagacctactttgagcagtggatgcgtctggcgacagaggttaagagcgcggcagacagcgcggatgaggacggggagattctcaggaagatagagctgctcatgtcggacagctcctttatgtccctggatcgtccggaagacaaggcggatcagaaggtggatgaagaactgatggccggaaagctggagcgcttctttggggagctgtcagctgcctgggaaggaaaaccaaaggtccttgtcagggctgtgatgtccaaaattctgtccaagctgccggtcttttttgattccctggaggaagtgcgtttgtatgtggaagggagcctcagaagctgctctgatgtgaaggaaaaagagatttccatgggccttatacgcatgttgatggagcaggataaatttgaccaggaagattattaggacgtgccttggcggaaatgggtttcagacatggcctggcgcgcagacagagggagatgaatgaatgcgctggtgggagcatctatatatgggagaccgggccggaaggcaccgggccagggtcctcatgggaatccgcgaaaggaagctcatgccggacacctatgtgattactcttcctcagagtgggaatcatatacttgacatacggcctgtgatgctgctgacagaggaagaacgcaaggcagaggatttcctgattttaggcgtggccgagggatatggggaagcatgtgaggtagtccgcaccatggtggatgatatgtaccggcatacggacggttttaactggaaatcatatatggcgtacctgggggaggcaagatgattcatattctgctcgtgatattgaagataataggtattgttcttctggtcatcctggggctgctgcttggcattctcctggcagtgctgttcatccctgtgaggtataaggcagagggaagctaccacggacagctgctgctgtcggtctgcgccacctggttctttcatatcctggcattcagggctgtttatgaaggcgaaggcctggtgtgcagtcttaaggttctgggcttcaggctgtggcacaatcgggaaaaggatcctgcccaggatttggaagacggtctggagaccatactgggagatgaagaacagtccctgtatgaggaactgcagcaggatgaggcgcattacaggaagtcccaggaggaacaggcccatggcggtcagtccgtcggggaacagacccacggcggtcagttcggcggtgaacagacccgtggcggccggtccgttgaagaacaggcccacggcagtcaactccatggggaacgggcaggagaacaggacgccaaccggaaggatagcagggaagaggaagatgagacagggcctgagtctggcaaaaaggggcccggtatcatggggaaaataaaaggcttcccgggccgtatcagtcagtcaatcaggcatatactggaaaaacttaagttttcttttgcgaaaatctgtgataagcttaaaggaatcagggagtttgttcaggaaaagaaaatgtggctggaggatgaaaagaatcaggcgtccttaaagctcctttacaggcagacaaaacgtctcctggtacatctgtggcccagaaagggcaggtgcaccgtcaccttcgggtttgacgatccctatacaacggggcaggtgctccaggccgccagccttatttacccgttttaccacaggcagctttttttgtacccggtatttgatgagaaaatactggacgcagagggaagcctgaaaggaagaatacggttatccgtaattctttggctggtactccaggtcctgtttgacggacatacccgcaggatgctgaagggtttcttaaagtgatatgacactcgcggcggctgttgggggatgggatatcctgtcccccaacagcccgcgggaataaatagagaagaggacatactatggcagagaatcaatttacatctacgatagacacgttatttagaggcatggaccagttcgtcaacaccaagaccgtggtgggggaaccggtacaggtgggagataccatcattgtccctctggttgatgtgacatgcggtatggcggccggaagctttgctgagggtgtcaagcagaaacagcggggcggaggaggcatgagcgccaagatgagccccagcgccgtgctggtgattcaggggggcgtaactaagcttgtcaacgtaaagaatcaggatgccatcaccaaagtcatagatatggcgccggattttatcaacaaattcctgggggggaagccggctgtgtctgaagagacggtccaaaccgcaaaggatacggcggcagcctacgacacgggtaaggcagaacatatggatgtgaaataggaatcccgggccgcctttctgcatatgatggaatatagcttgttgcagaatgggggagacaattaagatatgagaagaatatgcgggcttatgctgttctgctttggactggggatggcagtgctgctctttattccggagacaatctttaccttcctgttcgttatcggctgccttgtattaggatataatctgttctgttgttaatataaacgtatggcgtatcgaagaggaagaagactacaatagggattgaatataaaatacaggttatgcgttcctcccatgggagcatagcctgttttttactgtctggttttttgcggcagggactgacaagcggataccaggctgaatattgcgcaaaaaaaagacaccgcctgtcggtatgacagagacaatgtctttttccgtgatatgttctgtttcattaagctctttctacaaggcctgaacgtaagcaggaagtacatacgtacattctctgggttccaccattaaccttgactctgacagatttaacgttcgctttccacatcttgttggatcttctatgggaatggctcacttgaattccgaaatgagctgccttttcacagattgcacacttagccatactattgcacctccttaacacgttacttggattctttcattaagaaaaatccacaacaaatgtatgataccagaagtttgcaaattttgcaagtgaaaaaattaaaatttctttctttttttcagaaaatagtgtatactgtctctagtaaagaaacggaggcatgtgtatgaagggacgaatcagcaataaaatgggcgaaatccagattaacccggacgtgattgctttatatgcaggaaccatcgcagttgaatgttttggcattgtaggtatggcagctgtcagcatgaaggacgggctggttaaactattaaagagagagagcctgactcatggaatcaatgtggatataaatgataataaaatatccattgatttccacgtaatcgtatcttatggggtcagtatttcggctgtatctgacaacctgattgaaagcgtgaaatacagggtagaagaattcaccggcatggaggttgagaaaatcaatatctatgtggaaggtgttagagtgattgactaggaggaagtaacttgtgggtataagtacgattgacgccggtatgcttaagaatgccttcctggcaggagcaaaggggttagaggcaaagaaggactggattaacgaactgaatgtatttcccgtgccggacggggatacgggaaccaatatgacgcttactatcatggcggcggcaaaggaagtggcggagctggagaatcccaccatggaccagctggcaaaggccatttcatccggttccctgcgcggggcaagaggaaattccggagttatattatcacagcttctcagaggctttacaaaagaaataaaagcagtggaagaaattgataccaccattctggccaacgccatggtgaggggaaccgagacagcatacaaggctgtcatgaaaccaaaagagggaaccatcctgaccgtggccaaggccatggcggataagggcctggagatggcttcacagacagatgatatagaagaatttgtaaaacaagttatagaatacggcgattatgtgctgagccagacaccggagatgctccccgtgttaaaacaggcgggtgtggtggattccggaggccaggggctgatgcaggtggtcaagggggccgtggacggccttctgggcaggacagtggacttttcactggacacggttccggacagcgggaataggccggcagccggcgaaaaagccgccagaggcgctgcaaggacggatatagatacagccgatatcaaattcggttactgtactgaatttatcataaatctggagaaggtttacacggataaggatgagacggagttaaagtcatacctggaatccattggcgattccctggtggtggtgtcggatgatgagatcgtaaaggtccatgtacacaccaatcatcccggcctggcctttgaaaaggcgctggcctatggttccttatcccgcatgaagatagacaacatgagggaggagcaccaggagagggtcattcaggattcggagcgtctggccagggaacaggctgccagggagcaggaagacaaagacaaggcaaccggggaagaggcgccgtcagaacgcagggaatatggctttatagctgtatccagcggggaaggtctgagcgatattttcaggggaatcggagccgactgcctgattgaaggcggacagaccatgaatcccagtacagaggatatgctaaaggccatagaacgggtaaatgcagagaacattttcattctgcccaacaacaagaacattatcatggctgcacagcaggccagggatttgacggaagataagaacataatcgtcatcccctccaggaccgttccccagggaatcacggcattggtcaattttatgccggatctgggaccggaggaaaatacccggaccatgaccgaggagatgggaaatgtgaggactgcccagattacctatgcggtccgcaccaccaatattgacggcattgacatagaagaaggggatatcatggccctgggagaccacggtattctggcagtgggaaaatccgtggacggggttgcactggatgccatgaaagagatgctggatgaagaaagtgagcttgtaaccatatattatggagcagatgtgtctgagcatgaggcaaaggttcttgaagaacaggcacaggaacagtatcctgataaggaaatcgagcttcagtacgggggacagcccatatactactatctgatttctgctgagtagaaggaagaaggcaaaggaggagccagaagagagaatggctagatggacaagagatgaggaactgaaccagccggctgatttcgtgcagttcatgatggaggactttcttacaaaaaacgggttcaaaaaaaagacccacaagggacaggaagtctggcaggagggcgatggctttctgaccatggcaaggtttatacggtatgagtataacgacggaagctttcatctggaagcctggatcggtaagaaacgtgagaatcccatcaagggatttgtgggcgccatgcccaagaagatgttccgggagagcctggaggagttaatacgcctgctccatcagcccctgccccagggacaggaagacacaggaaacaaagtcattaccatacaggtacctgaccacggaaagtgcgctgttccagccatgatactctctatactgggaattgtggtgggcctgctgctttcgcctctgggcggcattgtgctgggaggactgggaattaccttcggacagaaggcccgcagctccagcaaaaacaatataggcagggcggctgtgattctgggtaccattgccatggtggctgccatcatcggttacattatcaatctgatttttgcatttacatttatattttaaattaaaaggagcggatgactatgaatgaaaacatgatgaacagatcttacgaagttcaggtagagggagactcactgggacgctacacggcaaagacttttggctggatgtttgcagggcttttggttacctttattgttgcggtgggctttgcaatgacaggaacgattttttatatatattccttccgttactggcctctggcacttctggccgccgagctgggagtagtgatatatctctccgccaggattgagaagatgtccgtgggtatggccaggagcttattcttcctgtatgccgcccttaacggcattgtattcagcgcatatctatttgcattcagcctggagattctgtggatggtattcggcatcacagccctgttctttggaatcatggcattgattggctggtttggcaatattaattttaccaagcttcgtcctttcatgcttggaggacttgtattcctgtttttctactggatttttgcaatgtttattgatttaagcgcatttgacaccattgtatcgactgtgggaattttcctgttcctggtactgacagcctatgatgtgaagaagatacaggcattccacgcatactacggccaggcgcctgagatggcagccaaggcctccatcttctccgcactgcagctttatctggattttatcaacctctttgtgtatattatgaggattttggggcgcaggaagtaagcagggatacccggcatatacttaatggaatactatgattatccaaggggtgcattgacgtgactggattagagttgcggcgatgcgccctttttgcatgatgaattttgcatacagacaggaggtaaatatgaaatatgtattgggttttgatataggcggaacaaaatcagccgttcttctggccaggccgggtaaagaaaacgtggaatttctggaaagaaaagccatccctactcacggaacgtggaaggaagtgctgggctgcctggcggataagggaaaagcctttttggaatcacatcagatatccggaaaagaatgctgtatcggcatttcctgcggaggacctttggacagcgaaagaggcgtgattttgtcgccgcctaatctgccaggctgggaccaggtaccgattgtgtcctatttggaacagcgtttggacatggatgcaagacttaagaatgacgcggatgcctgtgccctggcagaatggcggtacggggccggcaggggctgccgccacatgatattccttacctttggaacaggactgggagcaggattggttttaaacggaaggttatacgaaggagcttgcggcatggcaggggaagccgggcatgtgcggctggcagaggaaggacctgtgggttacgaaaaggcgggaagttttgaggggttttgcagcgggggagggattgcgcggctggccaggtccatggcagaggatgctcttaaggcaggccgtccggtttcgtacatgaaagagggaggactggatgatatcacagccagggatgtggcagaagctgcggaaatgggatgcgcggatgccggagaagtcctggcagtgtccggacggtattttggcaggggacttgccatgctggtggatatactgaatcccgagagaattgtagccggaggaatttatgcaagggccggcaggttccttaaggacgagatggaaaaggagcttcggagggaggcgctcccagccagtgtaaatgcctgctgcatcctgccctgcggcctgggggagcagattggtgattatggggctgtgatggcggctttcgagatgtgggaggaatgaagagcatgaagggaaggatgctgagagaggtgtggagaagctgtcgggcatttacaaatttagttgcctaagaagtcaaagactgttataattttcatgtcagatacattgtttcaaaagtatatattgaaataatatatttcagaaaggggagcatatatgttaattggagcattggaagcaggcggcactaagatggtgtgcgccataggaaaggaagacggtaccatattggagcaggtatccatacccaccacaacaccggaggagaccatacctaagctcattgaatattttaaggataaggagatcgaggccctgggcgtggctgcctttggccctgtggatgtgaagccggagtcagagacttacggatatatcctggacacgcctaagctggcatggaggcataaggatcttttgggcaggcttaaggctgagcttaaggttcccatgggactggatacggatgtgaacggttcctgtctgggagaggtgacatacggatgtgccaggggactggacagcgttatctacatcaccataggaaccggtgtgggcgtgggcgtatgcatcaatggaaagctgctgcacggaatgcttcacccggaaggaggccacatccttctggcgcgtcatgaggacgattcaaagggcggtatctgtccttatcacaaaaactgtctggagggctttgcaagcggtccctctatcgaggccagatggggtaaaaaggccgtggaactggtggacaggcccgaggtatgggagatggagagctattacattgcccaggctcttgtggactatatcatgctgctttctccccagaaaattattctgggcggcggagtcatgcaccaggaacagctgttccctatgatccgccaaaaggtgagggagatgttaaacggctatatcaagacaaaggaactggaagacatggacagctacattgttccggcaagccttcacgatgaccagggaatcatgggatgcataaagctgggactcaatgcgttacaggcatgacttcctttggaggattctgatacatgttaaacagacagccggtaaactcgttaaaaggaattggcgagaagacaggcaaactatttgaaaaactgggggttctcaccatagatgacctgctgtcctattatcccagggcatacgatgcatacgagcccccggtgtccatagggcagttaaaggagcaggctgttatggctgtggagtcggcgcttgtcaggggagctgacctgctgcgtctgggccatatgcagattgtctcggtgcagcttaaggacctgacaggctccctccaggtatcctggtataacatgccctatatgagggcaaatttaaagaccggcgtcacctacgtattccgcggcagggtggttaagaaaaggggacggatggtcatggaacagccggaggtatttacccctgacagctaccaggccctggccggctccatgcagcctgtatacggacagaccaggggcctgagcaataagaccattgtgcgggcgcagcagatggccctggaaatgcggaagatggagcgggagtacatgccgccggatttaaggcgcaggtatgagctggctgaaatcaattatgccatggagcacattcatttcccggctgaccagacagagcttctgttttccaggaaacgtctggtatttgacgagtttttcatgttcctggtgggggtcaggcgtctgaaggagcacagggaggacaggcattctgcctttatgataaaggagtcggaggaggtgtcttcctttaaatccagtctgccctacgcccttacaggagcccaggaaagggccctgagggaagtatatggcgatatgggaagcggcctggtgatgaaccgcctgattcagggagatgtgggaagcggcaagaccatcatagccattctggccctgctggaggctgcatataatggatatcagggcgcgcttatggtgcctacggaggtattggccagacagcactttgaatccatgaccggcctttttgaaaagcagggaatcgaaaaggttcctgtgctggtcacaggctccatgacggccaaggaaaaacgtctggcatacgcgaagattgccagccatgaggcggacattataatcggcacccatgccctgattcaggaaaaggtggtgtacgacaaccttgctctggttattaccgatgagcagcaccgctttggcgtgggacagagggaacttctcagcagcaagggacaggaaccccatgtgctggttatgagcgccacgcccattccgcgtacactggccattatcctgtacggggatttggatatatccgtcatagatgaactgcctgcgggacgccagaccataaagaactgtgtggtggatccgggctatcgtccaaaagcatatgcgttcatcgagcgccaggtggcggagggccatcaggcttatgttatctgtcccatggtggaagagagcgagatgattgaggctgagaatgtgctggattataccaaggccctgaggaaagcgctgccgccctccgtgacagtggaatatctccacggcaagctgaagggtaaggaaaagaatgccattatggagcgctttgcagcaggggaaatccatgtactggtatccaccactgtcatcgaggtaggggtcaatgtgcccaatgcaacggtgatgatgatcgagaatgcagagcggttcggcctggcccagctccatcagctccgcggacgggtaggaaggggaaaggaccagtcctactgtatcatggtcaattgttcccgggaccagggggcaggggagcgcctggatatactgaaccgttccaatgacggtttttacattgcttcagaggatttgaagctgcggggaccaggggatatcttcggactgcgtcagagcggggatatggaatttaagctggcagatatattcacggatgccaatattttaaaaaaggtttcagaggaagtaaaccggcttctggatgaggaccctcagctggaaaaagatgagcacagggagctgaagcggaaggtggaggattacctgggaaccaattatgagaagctgaacctgtagcggatttatatggatttgctgtttaggggctgctatataacaattgcggcatgagaactgctgtataagaaccgctgtataaaaacagaaaggggtgttttaccatgaatgagacattgaatacgattttgaccaggagaagtaccagaaagttttcagacaagcctattccgggggatgagatggagctgattgtacaggccggccttcatgcgcccagcgggatgggactccagacatggcagtttacagttgtgagaaacagggagaagatccagatgctggcagcggccgttgaaaagacactggaccgtcagggatatgatatgtaccagccccaggttctggtcattccgtccaatgaaaaggagagccgcttcggcagggaggacgatgcgtgtgccatggaaaatatgttccttgccgcccattcccttggaataggttctgtgtggattaaccagctccagggaatctgcgatgagcctgccatccgccggattctgacatccttcggagtgccggctgaccatgtggtatacggtatggctgctcttggatacgcggccgacacgaaggaggataaggaacgtacgggtaaagtggtatatgtggattagtctgcatctgtacgactgatatgccgatgacagaaatagggatgacaaatggatgatgaaaatatgataaattaatgacaaaatccccagactgtgtttaacacatagtctggggattttctgctgtttccagcaatgatacaatcttacttcagaaatccttcagaaagggaggatttatttacctgccatctgacgctcctgggcttcaatcatcttcttaaccatatagccacctacggaaccattctgtgcagaagtcaggttaccattgtatccgttggttaacggtacaccaatctcgttagcaacctccatcttaaatctgtccattgcttcctttgcttcaggtacatttgttctgttagaattgttagacataataaaacgcctccttgtattatatttgccatgaaattgtttagtggttcatggcttgttttgtgttacaatcctattatgtgatgattcaaaaattataaactagaaggttcttcgtattttggttaaaaaaggaaatcggcttttttagaacgcatagacctttaaaactggttgccatagtatagtagaagttaatatttatttttaaggaggcggtatcggatgaagaaatctatgacaggtgcggaggttggaactgccgcaggtattaccgcaggaattgctgcgggtataacagcaggaatatccacagcaatcgccggactgctggccggagaatatttttttcatattgccctggatgcatcgacagataaatcagccctgttaaaacccgcgcccggcacagagaaagaagaaaaagtgccgggagaggaacgaaatgcaccagaagcagtaacaatgcttaaagcacagtacgaagaacgggaaatcgtgtcttttgaccagttaagacttcatggctatctgtgcagacagaaaaaaccaaataaaaaatgggctgtattgatccatggatatgatgattccggcatgtggtttggaagggaagcgctggctttttatcaggcgggatttaatcttcttctgcccgatgccagaggtcacggaaagagccagggtacatatgtgggaatgggatggcatgaccgcctggatatcaaagaatggatatgctggcttgtgaggcaatatccggattcggaaatcgtattatatggagtatccatgggagctgctgcggtcatgatggctgccggagagaagctgccttccaatgtaaaggcagcggtggaagactgcggttatacgtccgcctggtcggttttgtcatatcagatgaagtcccagttccatctgcctgcgttcccatttttatactgcgcggattttgtcacccgcataagggctggttatggtatgaaggaggcggatgcattgaaatgcgtggcagggaccagactgcccatgttttttatccatggcacggaggaccggtttgttccctttgagatgatgaaggagctctatgacgcctgcaggagcgaaaaggaatgtcttgcagtggcaggcgcggcccatgtgcaggcagcgctggtgggcggggcagagtattgggaccgggtgtttcggtttgtgggcaggtatttggaaagatagtaggcagagatatagatttctggagattgataccaataaatgggaggttattttggataccctaagccgatgattttcaatcataaatattaagagtaatgtaaaggattttaacacttcatatggtatactgttacacaaatgaaatcatctaaggaggaaacactacatggactacagaatgttgggagatatactgccggccgttgaaatcaggctgcaggcgggagaggctatgtatacgcagtccggaggcatggcatggatgagcgacggtttcacactggactccaatgtaaagggagggcttatgaagggactgggaaggatgttttccggcgaatccctgtttatggctacctatacggcgtccaggccggacagtaccattgcgtttgcatccactgtgccggggaagatattggccatagatacggcaaagaccagcctgatttgccagaagggagctttcctgtgcgcccagacaaccgtagaaatcaataccgtactgactaagaagtttacggccggattctttggcggagagggctttatacttcagcagatacagggaagcggcatggcctttttggaggtggatggagatgtggtggagagggttctggcccccggagaagtgattaaggtggatacgggaaatgtctttgcctttgaacccagcatatcctatgaaattgagacagttaaaggtgtgaaaaatatcctgttcggcggcgagggactgttcctcacaaaactgacaggccctggcaaggtatacatgcagaccatgaacattgcggaatttaccggacggattgcccaggggcttcctgcttccaaataatgagggaaatgttgcaaaaatcctaaaaaaacccttgtatatctggaattttcatattatacttgtttggtatgaaaattgctgcaagtgtgcggcgtatggaagcgggagttattgaatgagagtaatcgcaggcagtgccagaaggctgcttttaaagacactggatgggctggataccaggcccaccactgatagaatcaaagaaacgctgtttaacatgcttcagccggaattggcggactgcatgttcctggatcttttttccggcagcggggccataggaattgaagcgctgagccggggagccggtttggctgtaatgattgagaacaatccaaaggctttggagtgcatccgggagaacctgagcaggacaaagctggaggaacgggccatggtgatgggctgtgatgtgataaccggcctgaagcgcctggagggcaagaattacaagtttgatattgtttttatggatccgccctataatcatgagtatgaacggctggttctggattatctgaaccattcccccatggttacggaggaaaccctgattgtaattgaggcatccagggaaactgagtttggatggctggaagaatccggatggcatatgataaaaagcaaagagtacaagaccaacaagcatgtgttcgttggcagaggagagtagatgaggacagcagtatatccgggaagctttgacccggttacattaggccattatgatatcatagagcgcacagcaaagatggtggataaattaatcatcggggtccttaacaataaggcaaaatgcccgttgttttctgcccaggaacgtgttaatatgttaaaggaagtgacttcatccctgcctaacgtggagattcagtcatttgaaggcctgctcattgactttgtgcgcaggagtcatgcggatatcgtggtcagaggactgcgggccattacggattttgaatacgaacttcagatggcgcagaccaacagggtcattgcgccggagattgatactatatttttgactacgaatttaaaatattcatatttgagttccagcattgtgaaagagattgcggagtacgagggggatatcagtgaattcctccatccggtcattgcagccagggtaagagagaagctggaggagaggagacggttgacatgatgagtaggatagagcagttaatcagtgaaatcgaggaatatatagacagctgtaagttccaggcattatcaaacagcaaaattattgtcaataaggaagagctggaggaactgctggtagagctgcgactcaggataccggatgaaattaagaaatatcagaaaatcatcagccagcaggaaaccattttgaatgaagcccaggcccaggcggatgccatgctggatgatgccaagaagcaggcggattccatggtggcccaggccagcgaacagacttcggagatgattaatgagcatgaaatcatgcagcgcgcatatgcccatgccaacgaagtggtggagcaggccagcatacaggcccaggccattgtggactctgctgtgaacgatgccaatggaatccgccagagttccattcagtatacagacgacatgctccgcagtctccagaccatcatcaaccataccatggaaggagcaaggggacgttttgacgcctttatgtcttccatgcagtccagctatgacattgtttcctcaaaccggaatgaattgtcaggaggcattgtgaggccggaggagggcgaaggccaggcgcctcaggagatggatgacgcccagcagcaggcataggctgccggcacagggataggctatcagcacagggatacataaaatataagacaggacagcgcgctgtggagcattttccacagcatataatgccggatggacaatccggcattttttaatacgctttttgtctgaaatatgcctgaaaatccgccgaaggcagcggagccaatgataagtagggctcccatacttccgggcacggaggatgctatcatctggatgccggtggtgatttccacacttcccaacagggccgggcggagcaggggaggcatctgaaacggaaacacggtcagatacagagccaggatagagaacagcatgatataaccgcctattttgaccatggtttcaaaacagctcatcatgtgagtgtcaaaggaaaagcaggctgttttttccggtgctgcctgtgccgccaaaggacatgcttcctcacgggtctgccggttgtaatgatagcagcatctggctaatatggagatggggagtatgggaagatacagggctgccaggacagcccacagcgggcagggggatgccatggagggaatcagggcaatctgggccattacatatcccagcacaaacatgggactgggatgattgctgatggccagcaggtattttccctcctgaacagagagtctgccctggtctaaaaagtcgctggtggtcttggcacccatgggataaccgcataacagcccgctcatcaggcagaagctgccctggtctgacagggacaggatgcctgagaggatgggtttaaagggtcctgtgaggatatggatggcatccatagccacgatgacgccggagcatatcatgaagggaaggagcgtgggaaggactacatttccccaaagtacaagaccctgcctggcaccttccagtgcaagtccggggttgaacaacagcataagcagacagaggacagacagaacgcctcctatggattttttcatacgcacctgaatacaatggtttatacaaatatattgtaaagggtggcgggctatgcctttgattcttattttgctgctggcggtattccagtgttccattaccaattatctgattgcgaatccggattattaccagctggggccgtattcctgggagagcgatgatttcagggccatgagtctgggaaatgcggtggcagggcttgacaacctggatccggacatggttgccaccctgatggtggaacatgattatgaccttacaggccttaaggacaccagatataataacaggctgctggctgcggccaggcctgcggactaccgaaagctgaaacatgcatatgagaccgtcctgggggatttagagtactttccaattccagagagccggaataaggacacgccggaggtggcgtttgagaacggctggatggacgggcggggatatgtaagcggcggggagaacggcggagagaacggtggccggaaaaacagcccaaaacgccgccatgaaggctgcgatatcatgggctcaaaaatgccgcccggatattatcctgttgtcagcatgacggacggaatcattgaaaaaatagggtggctggaaatggggggatggcgcataggcgtgcgggctcccgggggagcctacctgtactatgcgcacctctacagctatgccggagactttaaggaaggagacagggtaaaggcaggggagctgatcggatacatgggggatacgggatatggaaagacagagggaaccagggggaactttgatgttcatctccatgtggggatttatattaagacggaccacaatgaggaaatgagcgtgaatccttactggattctcaaatggctggaaaagaagcggctggtgtttacatattagggctgctggcgcggtactggttgggggtcactccggttattttcttgaacagggtgcagaaatatttggcatcctgataccctacctggacacagatcatgttgattttcatgtttgtatcctggagcaggcttttggcgcgctccatgcggtaggaggtcagataatccacaaaagagcgggacatctccttcatgaataaccggctcagatactggggggtgatgttgagctgttccgcaacggaattcagggaaataggttctttatagctcttatctatcacatgaagggccttttgtatcagtggggaatagccggcggacgcgggtctgcccttgcatgtctcataataggaatcaatgcaggtcctgatttcatgcatggttctggcagccgccatctggtttaccgcctccagataggcctgtttggagtcaaacttgaccaggccggatacggcagcggcaagaatatgtctgggatggcaggcattggcctgcatctggctgatttttttaagcagtattttcctgcatccgtcaaagtcgccgccgcagagcatacgctgcaggtccttcttgaaaaatacatcctcgtttaattctcccgcctcctgctccatgtatgtatcgtaggacagaaagtgggagcggcaggtgatggtccagggaatggcactccggagctgttcaaaggcaagaagccagtttgaaataaaaccagcctgccgtgtttcataaatgcaggtcagatgctcgtatggctccagcagggatgaaatacggtcaattttgccgtggttaatcatgtggttcgtaaagcctatgaggatgccacggtagtgcttatccggcagggtcaggatataatggccccgctcttctatgacagcttccttgacctccaggggaagatggtgttcccgttccatatagaccacggccaaaaaataatccgtatagcagaagggggccaggcgttccgtgagaagcaccgaatcttcatcggataagagatggcatagctggggattctggctgtttctttttttgttcaggtctttcaatttgacttcaatgagattcctgagttttgaggggaccaccggtttcaggatataatcttccacatggtattgcagggcctttctggcatattcaaattccgcgtatccggtcagcagatatatggtgcctgcaaatccctttttgcagagcttttccgtcatcacaagtccgtcccagacaggcatgtggatatcgctgataatgatatccggattccatcgtatggcctttaagcagccttcccgtccatcgcaggcagtgtcgatttccaggttcggtatgggtgcaagcgtggctttcagcccttttcttgagttttcttcatcttccacaatcaacaatcgaaacatatttttcactccatttcattcattggtataaatatcttaaagcaggtgcccataggagaggatgacacaaaaatacggctgtgaggataatagccctttgtgcggtaagcaatattagtcagccctatgccggtaaaggcggaccgtcctgtggtaaagagaagattgatttccctcaccttatcttccggtatgccgcagccgttgtcagccacctgaaggagcaggtgggattggccggtgatacggcaggcaatctccagacggcccttgcggggcagattttcaaatccgtgaatcagggcgttttccaaaaacggctgtaaaagcagcttatggatataaattcgcctgccctttgtcaggtcgtgtatgtcgtaggagaaacggccgtgaaagcggcttttctgtaaatccagataattctgcatccagcagatttcatcctggagaggaaccacgcagttcatattatatactgtgtggcgcagaatggcagccagcttgttgagctgttcgcttacggtcagacagttttcctgggcagccgtccaacagatggaatccagggtgttgaacaaaaagtggggattgatttggagctccagagattttaactcagcctcgcagattttcttatactgctgcttgttttcatccaacaggccccggatctgccccagcatccggttaaaggaagattctatgatgcgaagctcattcctgctcatgttcctgatttccacatccagatgatgctcgtcaaacagattcattttggcggccacattttcaatggagaatatgaacttgtggcagagcacataggcgaccagcatggacaccagcaggatggctgatatggccagggtaatggtggtccacagcgcctccaggtcctttgtcatctgtctgtaatccactatatttataaggtgcaggtcaaaatgctccagcggtatctgggataccagataatccccctgcatgtccccggagtcagaggagaggctgtcccagtctatggctttgtagttttccaggctgccaaggatttttccggtgtttctgtctttggaacagataagccttccggaggaatccaccagtagtttatccgtaaagggatagacctgggaatccgggttattgatggcagagttcatcttatccggtgagatgaacagaagtatgctgccggttattttcattttttcataatggatggttctgctgcccagaaagaataccgggggctcagggtcataataagggctgccgtcgtggacggaaccaatgatggaacgggtcgacgagagaagaagctggttcagttcttccttattcgcctcaaaataatctatgattggctgggttttctggcgtttctgaacgtagatatagggggtgccggtggtgctgatgacacacaatgcctgtatttccgggtacatgagaatattggctttgatatatgtttccagcgactcagagatgcgcctgtattctgcggaatcaggagataccttggacagttccagtatattatccatgcaggtaacatcggtggatatctggaacaggatacgtttgtaatccgtcagcacgttattgatgctgttctgggtcagctgcaggttatctgccaggagggagtggtttttagtaaacagcatttcggaagtcttttcatagttaaaaagctgaatgctgatgaccgggagaaaggtcacaaagaacaggaaaatggtaatctggtatcgtattttatataaaaaatgtccctttatccatgggatgaattttctcacataaatcccccctcgcgccgaaatgtagtactaataagtggcttaattataattttaaccatcaaaatagtcaatatggtttaaaaaagtggaatgtattttggttaaaatatcaaaatgaagttaaaataatggaattccctaaattggattaaatggatatacttaagacatcagatgacagaaaatacaggaggggattacatgaaaaaacgtttattcacaagaggaattgcccttgggctggcagcggtgatgctggcagggtgttccggttccggcaccagtaccagtcagggcagcacagacgcaggcaccacaggccagtccgcagaaacccaggcgtctcagggacaggagcagaccaccattgaaatgtggtatcacatttctccggaccaggcaacgcttctgcttcagatgattgatgagttccaggaactgcatcccggcatcaaggtggaaacccagagcgtggctttcgcggaaatcaagaaacagctgtccattggcgtggctgcggatcagctgccggacgttacgctttgtgataccgtggacaatgtttcatttgcagccatgggagcagccatggatatcacaagcgaggtggaggcctggggagagctggagaattattttgaggcaccggtgaactctgcccggtacgaggataagtattacggggttccctattatagcaactgtcttgccatcatgtataataaagacatttttgatgaaatgggactggagtatcctgacagcggctggacctgggatgactttaaggacatgacggccaagacaaccacggcagaccattacgggcttacaatgtccctgattaaatcagaggaagggacctttgatgtgcttccgtttatctggcaggcaggggcggattatgacagtctggattcagagggggccagggaagcccttaccatgattaatgatttctaccagaacggatatatgagcaaggagctgatatccatgacccaggcagatatgtgcgcttctctgttcgcaaccggcaagtcggccatgatggtggcaggaagctggctgaataccaatatccagaatgagaacccggatctgaattacggcgtggttaccttccccaactacaaaaatgccgcttctcccataggtggagggaacatcatgatgatgaaggatgacaacagggaagcgtcctgggaattaatgaaattcctcagcagcaaagagaattccaggaaattctgtgaggatgccggttacatatcaccaagggaagatgctgtggcggagagtaccctgtggctggatgacccaattctttcggtctatacggaacagttaaagcttgccaaggccagggggcctcatccgaaatggcctgagatttccagtgcgattcagtttgcgtaccaggatgtgctctcgggtgccaaatcagtggacgatgcactgaagcaggcagcggcagaggttgcggaaatcatcagcgaataaagaagagggcgcgcagcagcgccctttttgcgaaatggagtgggaatatgggaagtaagaaaggatatttctttaagaagaagctgacactgtttgcgtttgtcctgccgggtgcagcgttcatgaccatcatgattatttttccgattataagcaatataatcatgagctttaagaatgtggatttgatgaattttgccacaggcgacagccattttgtgggacttaagatttaccagaaaatatgcaggacagaggtcacctggattgccgtaaagaataccctggtattcaccctgtggtgtcttgtattccagttccccatcgggtttctcatggcgctgtttttcggccaggattttaagggagccggacccctgcgggccgtcaatgtggtggcctggatgattcccatggttgcggtagccggtgtgttcaaatacatgttcaacagcgatataggaatcatgaaccgtatactgatggggctgcacctgattcagaagccggtggaatggctggcacatgggaatacggccatggcagccattataatcgcaaacatatggaagggagttccgtttaacatgattcttctggcaacggcgctgaccacagtaccccaggatatctatgaatcagccagtattgacggagccaccagaatacaaagattcttttatattacagtgcctcttttgaggccggccatcatatcggtgctaacactgggattcatctatacctttaaggtgtttgacctggtgtatgtgatgacggggggtggacctggatcttccacggagatgctgtccaccctggcttaccgctattccttcagtgaatataacttctcccagggagcggctgtggccaacattctgtttgtaatgcttatggcggtgggaatgatttatattcatattgtgacgcgggaagatgaaaattaggaggtgaggactatgaaggatagaaaacgtatggaaggccggaggaaggcagcgctgacagccgcaggcatactggttacctgtgtattcctgtttcctttgtactggatggtggccacatcgctcagaccgccgggggaatccttttccaacccgtccttttttcccagcaggattgtgtttgattcatatatcctgaaaaatgaacatgggatcagcctgttcacatatcttaaaaacagtgttgtggtttcgttcggggcaacagccctcaccctggttttaggggttccggcctcctatgggctggcaaggtttaaaagcaggatgataagcgtgcttttgttcatcttcctggtggctcagatgctgcccagctcactgattttgacgcctctgtttgtaaattttaacaaactggggttaatcaacaatcatctgggagtcatcctgtccgacgcaaccattaccataccatttgtggtcatcatactgaggacatattttaaagacatacccaaagaactggaggaggccgccattattgacggatgcggtcccctggggacattcatccgcatcatggttcccatcagctatccgggtatcgtgacagccacttccatggccctgttcatgtcctggggcgacatggtgttctccctgacattcctgaatcaggaaaagctaaagaccctgccgctgattctttacaaggccatgggcgagctgggagtcagatgggagattttaatggcctactcaaccgtagtggtgcttcccattgttatcgtgtttatctgtctgcagaaatacatagtcagcggtctgaccgccggctcagtcaaagggtgagaggagtaaaaagatggagaaaagccttggagaaatcatgcacggtctatccgaagaaaacatagcccgtgaggaagaattatttgagaacatgcctgtatttcccagaatcagccggtcaaagaacctgaccatgctgctggtgcacagggtgaaatcctgcacccctgtcccaaagggatgtgatatcctggcagagggcttgtatgtggatgaaaattatacatacaggtatctggattaccgccatgtgtttacagaaaagccaaaccgcagtaccctttccatacggctcagatttgtcaatgagaatacgctgcgggtcaccatggcggagggtttttgtgtgccggaaaacaggacggaaatgattggggatatggaagagacggaatgcagcgtcacctgttctgaatcagaggaccagattgtaatggcaaccggatgtatgacagctgtgattcagaaaagtccctggaacctttctgtcaaaaacagggatggggaggtcatataccgccagttcggcagggactgccattcctttatgccctatgagatttgtcccatgggattcctgtttgacagaaacacaaaggaacaatatgcctgtgaggcggcatggtccgatccctatgaggagttttacggattgggggagaattttacatctgtgtcaagaaagggccgactgttcgatttgtggaacaccaattcccttggggtaaacacggaaaggggatataaatatattcctttttatatgagttccaggggatacggaattttttataatacatccaggaaaatacggtgtgatttgggggcaaccttatccaaggcaagctataccatggtggaaggagcgctgttagattattttctgatgacaggggacacaataaaggacattattccggcgtatcacaggctgacaggactgcctgcggtgcctcccaaatggtccttcggcatctggatgagtaaaatcagttacggtaccagggaagaagtggagcgggtggccggacagatgagaagcagcaggcttccatgtgacgtcatacatattgatacggactggtttacggaaaactgggtgtgtgactggaagtttgacgagaaaaaattcccaaaggtggaggagatgattgaaaaactccatcaggacggatataagctgtccctctggcagcttccctatattgaacggggaaagacctcctatgaggtttatgacgaggcggctgccaacggatattttgccggaaatccggacggtgaccttcagtttcctcacggacttattgacttcaccaatccggaggcagttcactggtataaggaaaaactgataaaacccctgctcaggaagggcgtggatgtcatcaaggttgactttggggaatccgccccggcattttttaagtatgcaggcgccgacggcagggacatgcataacctgtatgccctgttgtacaataaggccgcatacgaggccgctaaggaggaatttggggaagataaggccctcatatgggccagaagcgcctgggccggctcccagaaatatccggttcactggggcggtgatgcgggaacggattttggaagccttgcaagctccgttaaaggctgtctgaacctgtccctcagcggaattcccttctggtccagcgacatagggggattctggtttgagagcagcccggagctttatatccggtggctggaatttggcatgttctgctcccacgccaggttccatggcttttattccagggagccatgggattttggccagcaggcagttgatgtttacaggaaatacgcgggcctgcgttaccgcctgattccatacatctataaccaggccctggctgtcagggaagaggacacactgatacacaggccggtgttctatgactatccgtcagatttaagcgcggccggtctggatacccagtatctgtttggaaaagagcttatggtcattcctgtgttaaatgaagataattcagtgagaatctatcttccacggggtcagtggacggatttttacgacgatacggttgaggaaggcgggaaatggatggaacaggtggttccgttagataagataccggtctatgtaaaggagaacgccatcatccccattgggcctgaaatggaatatataggacagaaggaagatgaccagtgggaaatccattgttatccaatggagggcaaaggtcggctctgttcctatgaacacggatttacagttgaaatgcacgcatcggctgaccgggtcaaaattgactgcaccagaacggacatgaaccttacctttgtcctgcacaacataagaccggccggagtgcaggctgacggacaggacattggtttcaggatggaccataaaaggacttatatccatatgggcaatcggatgcaggaccatgatatccatatggtcatagagaaaggagagcagtaagtggcatattacacaatacccaggtatgagggaaagacagaaggaaaccgcatcatatgggagacggcaggagagctggtctatatcgaaccatacggaagggacgccatacggttccgctccagtaagagcctgcgcattgatgaagctctcaactggactctggaggaaccggcctctcctgagggagttatcatagaagcggatgatgaaaaggcctgcatgacaaacggtaaaatacaggtgacgattacgggcgacggcaccgtcacctaccggaacacccggacaggaaaggtgcttctggaggaatactggattgacggaagggtacacacggcccctctccgcagggccagggaatacagggtcacatcaggcaatcagtttaagataagcctgtactttaaggcggagccgggcgagcatttttacggaatgggacaggacgccaatgactgctttgatttaaaggggagcacggtggagctgcttcagaagaacggaaaatgcaccatcccctatacatattcatccaggggatatggattcatatggaacaatccagccataggccgcgctgaatttgtcaacaaccataccatgtggcatgtacagtgcgcaaagcagattgactatgtgatcatagcaggggacacgccgggagagatcaatgagaaatttaccgccatcacaggccgggctcccatgctgcctgagtgggccgcgggtttctggcagtgcaagctgcgctatgagacccaggaggagctgcttcaggtggccagggagtataaaagaaggggacttcccatttcagtcatagtcattgattattttcactggaccatgcagggagaatggaagtttgatcctgagaaatggcctgatcccaaggccatggtcagtgagctggagtccatgggtatcaaactgatggtgtccgtctggcctaccatagacccaaggagtgaaaattatgcatatatgagagagcataattacattctcaggggagagcggggagtggacgtggtatttatgttctttggtccccagacttatgtggataccacccatccgggagcccgggaatttttctggtccagggctaagaaaaattactatgactatggaatccgtaccttctggctggatgaggcggagccggagatgcggccctatgattacgacaatgtccgcatgtaccttggaaacggggaggaggtcagcaatatctattgcgtggggtttgcaaaggcattttacgacggcctgaaagcccagggtgaggaagtgtgcaacctggtcagatgcgcatggctgggctcccagcggtatggagtcgtactatggtcgggggacattgcttccacctttgacagcctgagaaaacagctgaaggcagggcttaacgtggccatgtgcgggataccctggtggaccacggatatcggcgggttcatcaatggggatccggagtcggaagaattccgggagctgatgattagatggtttgaattcggcgtattctgccctatattccgccttcacggattcaggcttccctatccggtaagggatatattgaatccggacggttactgtggttcaggaggtcccaatgaggtatggagttttggtgaggaggcctatgaaatcatccgccggtatatgaatgtcagagaagcattaaagccgtatatcatgaaacagatgaagctggcctctgaagacggaacaccagtcatgcgtcctttgttttacgatttttgcggggataaaaatgtatatgacataggggatgagtatatgttcggaccggaccttctggtggccccggtggtggggctgggagccagaaagcggatggtctatctgccggagggatgcaggtggaaggacgcgggaacgggcatggtatatgacggcggaacgcggattgaggcagatgcgcctctggataccattccattgttcctgaaggaggatgccaggctgtccctgcagatgaaaccaagcaccgctgaaactatgcaccgctgaaaccaggcaccgcggatgaaatagagggataaaaaagaggataaagtaagaggataaaagacagcgggcttttcatgaaaaccatcatgaaaggcccgtttcactgcgcccggaaggcatgtatacagcataactgtcagcatgactattttgcaaagcgccccagccgtttccccacacgtcccaagactccgaagaaaatctcacaggccctgtccatgcacaggactaccgtattgtcatacaggaaggagagggccaggctgatgaccagggtaagcaggaaggataccagtatgccgcctgcaattccaaaggacaggccgttaatgccaaacacgtcgcccacaatccggtgcagcaccagccagtgaatcaggagaatggagaagctgtacctgcctatggcggagagcagggtgggaatccttgcaaacagacggtccccatgttttcggaagaagagaaatacggcgcaggtaaagagcatctggggaggcgcgttgttgtaaaccagggggcccaggctctccggggccatgatggagcccgctattgccagccctgacaacaggcctgccgtcatgaatagccggtaatgcttcatggcagaccgggtggtgcagtaatatcccagcaggaaaatggagtcccatgatgccaggaaggaggaggctgcaaactgtatatgaaccagagggccgtaggtgtagatgaaatgcaggataaagataacagcggccagtgcctccagcatgggttctgtcatgtgtcttaacatgattcggaaaaagggtgctgcaacgtaaaacatcaggataatatacaccagccagaaatgaggtgtctggccgctgtcattggacaggaagctctgtatcaggctgccccagtttccgggactgagggcaaagatgccttccacataaaagaagtataagaggtaataggcaaaacagggaatcagcaccctgacaaagcgccgggaataaaattgtaagacggattcctcccttcctcccaacagcagtgccccgctgagcatcatgaacagcaggttgcagcttaagcccagaccggccgccgcagccatcacatttctggaaaaggtatggggaggaagcagggcataagccggctccagtacatgaacgaggatgaccaggaaggaagccagtaccctcagataatccatatatacaatgcgtccgggctgattccggcatcctaacaacagttcccctgcataacccggggatgccgcggcccgcctgctgtgaatcaggcaggagcatgcggcgagaacagccgcggcagcataatgctttgggcgcagaggccggatgggaaggccatagcgaagttccataagcatatatataagtgtggtcaaaacaataaataccaacccgtagcgaagtttctttccgttcatacagcgtgtctccctgccaatcatgcaaaaatgccctgcaaatgtccgtctaagtctgatttttccagtataccattaagcagataaaaaacaactggaatattccatgattttgtattataatgatgcctgctatttttggaaaggtagaatataactatatgactaataatatgacaaccggaaagccggcaaaactgattttgcagttcatgattcccacctgcctgggaaacatattccagcagttttataacctggctgattccgtggtggcagggcgtttcatcggagtggatgccctggcagccatcggaagcaccacatcccttatttttctggtgataggctggctcaacggtcttaccagcggtttttccattatggtggcccagcatttcggtgccgggaaatatgaaaggatgcgccgcaatgtggccatgtccatctatctgtgcctggcctttgtgctggtcatgacaatcgcgctggagatacttaattatcccattctccgcctgatgaacgcgccggatggaatcatagatgacacggccggttatatggctgtgatttacgcagggctttttgcgacggctgcctacaacgggctggcggctgttatgagggcattgggggacagccgttcaccgctgtattttctgattatttccgcggtcatcaatgtgctcctggatgtggccttcatcatctggtttggaatgggagtggagggctgcgcctacgccaccgtgattgcccaggccgtttcagcccttctgtgttttctctacattgtgaggaaatttgatatactgaagctgagccgggcggattttcgtatctccttcggcattatgggacggctcctgtccatcggaattcccatggggcttcagttttccatcacagccataggcactatcattgtacagggggccgtcaatgtctttgggtctgtgtacattgccggcttttcagctgcgggcaagatacaaaacattgtgtccactgtgtttgtggcgttcggggcaacggcagccacctatgtggggcagaaccggggcgcaggccgtatggaccgcgtccatcagggggtcaagtccatacaggttatgattctggtctggagcgctgttatgattctggtcatccatttattcggggatatgctgatccatatatttattgacgcatcggagacagaggtaatgagtgcggccagaacgtacttcagagcagtggcatggtgttatcccttcctgggaagtattttcctgtacagaaatgccctgcagggtctgggatacggacttatgcccatgatgggaggcgtgtttgagctgattgccagggctgctattgtagcggcagtggcaggaagcttcgggtatgtgggagtgtgcctggcggacccggcggcctggctggcggccctggttcccattgtgccctattacttttataaaatttccaggatttcccggaaagaaacgcacggtggcagaatcacggcggatgtgatatgataaatacaattgtgacagttttgacctgtactgttataaagaaatgagggcggatgatatgacggatgtgagacagcttccggaggcctttctgctgaaaatgcagaagcttctgggggaggagttcgggcagtacctggaaagtttcaaagaggagtggaagcccggtctcagggtgaacacgctgaagctttccccgaaggaactggctgaactggtgccgtggaacctggagccggtgccgtgggcagacaatggtttttattatgacgggacgctggacggggaggtattaaggccctccaagcatccggcctattacgccgggctttattacctccaggaacccagcgccatgaccccggcagccatgctgcctgtggttcccggagacagggtactggacctttgcgctgcaccgggaggtaagagcacagagctggcgtcaaagcttaaaggccggggaatgcttgtgtccaatgacatcagctattccagggccagagcgcttcttaaaaatctggagctggccggtgcggcaaacatctgcgttaccagtgaagggcctgaaaagctggccggcgtgtggccggagttttttgataagatactggtggacgccccctgttccggggaaggcatgttccgccgggatgaggatatggtgaaggactggaatgaaaagggaccggaatactatatgcccatccagcgccagatactgtcccaggccgcagccatgctcagaccgggcggatatatgctgtattctacctgtacgttttccgtggaggaggatgaggggaatgtggcctatgtcctggaggaatttccgcagatgcagctgtgttgtctggaccttgataaagtgccgggagcatgcggcgggtttgggcttcccggctgcatgaggctctttccgcaccgcttaaaaggggaggggcattttctggccctgatgcgaaaaaagggcggggatgacgggggtaaggagatactgccgcccatggactccggaacagccaggaagcgggtccgggctgtggagaaggaaaaagagctggatgcatttttaaggcagagcggcgcagaatgggattatgggcggattgtcatacaccaggacaatgtctactatctgccggagggacttgcatggaacctgcccctgagattcctgcgcacggggctttttctgggagagctaaaaaaaggacggtttgagccatcccaggccctggccatgtccatgaaggccgggcagtttccgaataccgtcagcttccctgcgggtgacagcagggtactccgctatctgaagggggagactatttccctggaaggggatgaaggaccggttaagggatggtgcctggcagccatggagggatttcctcttggctgggccaaaggtacggggatgagcctgaagaataagtactatcccggctggagatggcagtagccatccgtatgaaagcatctaaagttaaacaacgcaatgggaggaaagggaccgatggctgataaaggcaggaaaaacggaccgatgcgtcttgaccggtttctggctgagatgggatacgggacccgtacccaggtaaaggatatggtgaagaaaggacgcgtccggatgaacggagaggcggtaaaggacgcggaccggaaggtgaacccggaatcagatattgtagaagtggacaggagccgggtggcgtacgccagaatggagtactatatgctcaacaagccccagggcgtggtgtccgccaccgaggacaggaaatacccgacggtggtgggtcttatcagggaggctttgagaaaagacctgtttccggtgggcaggctggacattgacacggagggacttcttctcatcaccaacgacggggagctggcccacaatctgctgtcgcctaaaaagcatgtggataaggtatatctggcccatgtgtcaggagggctgccggaggatgccgtaaagcggtttgaggaaggaatcaaactggaggacggcaccatgacccttccggcagagcttaagatactaaaaggagcaggaccggaggaagacgcgcaggaagtactggttaccataagggaaggaaagttccatcagattaagcggatgtttgaggcgctggggtgcagggtggagtatctgaaacggatatccatgggaccccttatcctggacccaaatctggaaccgggggaataccgtcccctgactctgcaggaggaggcttccataaaggattgcgggaaccggggaaaccgtgtataactatataggagtcacagaataagagtcacggaaaacttgtcaacatgtttatagacagaggaaaatagggaaagatgaagttaaacaggaaaaaagcagttatatttgatttggacggcacactggtggattccatgtggatgtggaaggcgattgacatagaatacctggccaggtttggtcttgcctgcccggatgatctgcagaaggaaatcgagggaatgagcttttctgagactgcggtgtattttaaggaacggttccggttaaaggaatccctggatgagataaagaacgcctggattcagatgtccatagagaagtacagaaaggaagtaaccttgaagccgggagcgcgggcttttctggaatttatctcaggaaagggactggtggccggcattgccaccagcaacggaagggccatggtggatgcggtgctggattcactggacatacgcaggtacttcaaggtggtggcaacagcctgtgaggtggctgccggcaagcctgccccggatatatatctgaatgtggctgagcgccttaaggtggcgccggaggactgtgtggtatttgaggatgtgcctgccggcatccaggccggaaaaaatgcgggcatgactgtctttgctgtggaggatgcattttcattggagatgaaggcggagaaggaacagctggcagattactatatcagggattattacgaattattggatggagcggcaggatgaaaaacgattatttacccatgaaccggaatgatatgagcatcagaggatggaagcagtgcgactttgtgtatgtgtccggcgacgcctatgtggaccatccttcctttggcacggccatcatatcccggctgctggaggcacgcggatataaggtgggaatcatttcccagccggactggaaggataaaaagagcattgaagtgctgggaaggcccaggctgggcttcctggtatcggcgggaaacatggattccatggtgaaccactattccgtgtccaaaaaacggcggaaggaagattcctacacaccgggcggcgtcatgggcaaacggcccgactatgccgtggtggtgtactgcaatctgatacggtccgcgtataaggatgtgcctgtcatcataggcggaattgaagccagcctgcgccgccttgcccattatgattactggtctgataagctgaagcgatccgtgctgcttgattcccaggcggatctgatatcctatggcatgggagagcggtccattgtggagattgccgatgccctggacagcgggctggacgtgaaggatattacatttatagacggtacggtatataagacaaaaagcctggaatctgtctatgattataagatgcttcctgactatgaggagcttttaagggacaagaaggagtatgcaaagagcttctatgtccaatacagcaatacggacccgttttccgggaaacgtctggtggagccttatgggaatcagctgtttgtggtgcagaaccctccgtccaagccactgagccaggaggaaatggatgaggtatatgctcttccttacatgaggaactaccatccctcctatgaggagcttggaggcgtgcccgccatccgggaaatcaagttcagcctgatcagcaaccggggatgtttcggcgcatgcagtttctgcgccctgaccttccatcagggccgcatcatccaggccagaagccacgaatccctggtggaggaggcaaggcttctgaccgaggaaccggatttcaagggctatatccacgatgtgggcggccccaccgcggatttccgtttccctgcctgtgaaaaacagctgacaagcggcgcgtgtccgggccgccagtgtctttttcctgaaccatgtaagaacctgcgggcggaccacagcgattatattgctttgcttagaaagctgagggctcttccaaaagtaaagaaggtatttatccgttccggtatccggtttgattatgtgctggcggattccaaccggaaattcttaaaggaactgtgtgagttccatgtcagcggtcagcttaaggtggcgccggagcatgtggcggacaaggtgctgacccgcatgggaaagcccaggaacagcgtttaccgccagtttgtgaaggagtataaggagatgaaccagaggctgggcaaggagcagtatctggtgccctatctcatgtcctcccatccgggttcttccatgaaggaggcggtggaactggctgagtatctcagggatttgggatatatgccggaacaggtacaggatttctaccccacaccctccacggtttccacctgcatgtactacacgggatatgactgccggaccatggaacaggtctatgtaccggtcaatccccatgagaaggccatgcagagggctctgattcagtacaggaatcccaggaattatgatttggtgacggaagcccttaaaatcgcagggcgcacggatttaatcggatatgataaaaaatgcctgattcgtccaaggaacggtaacagggacggtgggacggccgctccggcaggaaaggcgagaggcaacggatataaagcggcaggccagggagcaggagaagccagaaggcctaagaaaaccatacgcaacatccacaaaaagaaaggaatgtgacaggtatgaagattgctgtagtgactggagcgtcctccggtatgggcagggaaaccatcatccagctgtgggaacatttcaagggctttgacgagatctggatcatagccagaagaagagagcgcctggatgaactggaccgccaggttggggtgcccctgcgcaaatttgcactggatcttacaagggagcgtgacagggacgtgctcctgcgggcactgagtgccaggaagccccaggtaaagtttctggtcaatgcagcaggctttggtatgattgggcaggtggaggagctgggcttaaagagtgagacagacatggtggccttaaactgtgaggccctgtgcgccgtaacccgcatggtgctgccctatatggaatgcaatagccgaatcatccagtatgcatcctccgcggcgttcctgcctcagcccggatttgccatctatgcggctacaaaatcatttgtcctcagctacagcagggccctgaaccaggaactgagaagccggagaatctatgtgacggcggtgtgtccgggaccggtaaaaacagagttctttgacattgccgaatccacaggcgtgattcctctctataagaggctggtcatggcaaatccaaagcgggtggttcaaaaggccatccgggacagcattgcagggagagagatttcggtctacggcattaccatgaaggcgttccggctgctgtgcaagatgatgccccaccgcctgcttctggcagtcatgagcttcatgaatgattaattacctacaaaggagtgccgccatatgcagacactgacagttacccagaatgaggccggacagcggctggataagcttctcacaaaatatctgaaccaggccggcaagggttttatctataaaatgatgcgtaaaaagaacataacgctgaacggcaaaaaatgcgatggttccgaacggctggaagagggagaccaggtaaagctgttcctctcggatgagaccatagaaaagttttctgtcccggatatgggcggatatgcgaaacagccgggagaccaaagcagcacaggagcatcctcccatgagaaacgggaaaaggcccggggaaaaggcggtgaacaccagggctccagagaccgggagggaggccggcgtctggacattgtctatgaggaccagcatatcctggtggtgaacaaaccgtccggcatgctgtcgcagaaggcaaaggacagcgacatgtccctgaacgaatatattcttaattatctcattgattcaggaaaactccccatatcccagctgcgcacctttaagccgtctatctgcaaccggctggacagaaataccagcgggctggtggtggccggaaaatccctggcaggcctccaggtgatgaatgaggtatttaaggacagaagcatacacaaatattaccagtgtctggttgccggcgagataaaggagaagcagctgattgcaggttttctgaaaaaggatgagagcacgaataccgtaagcatttttcctctggaagtggaggacagcgtccccattatgaccgaatatctgccgctgtccggcaacaaaacattcacactgctgcaggtgaccctgattacaggaagaagccatcagattcgcgcccatctggcgtccattggtcatccgattgtgggagattataagtatggcagccgcagcttaaacgatgcagtaaaaaagaagtacgcggtccggtcccagctccttcactcctggcggcttgtcatgccggaaacacttcctgcgccccttaagcatctgaggggagaggaatttaccgccaggctgccggtgattttcaatacggttatggaaggagaggggattgggctgccttgcgaaagccagggcatttaaccaggcccggaccatggaggtttgtcccggaccggagcagggaattcttgacaggaattcatctttgggttatgctagataatgtttgaaattgccatttttttgctgctgtttttcccgtggggagaacggctggcttaaggggattttcaggcatgttctgtacaagtaaaaaacagcgttcagaccagcgatggcctgatgctgaggaaatgagagggatatatcagatgggaaagattatactgaccggtgaccgccccacaggacggcttcacgtaggacattatgcaggctctttaaaacgcagggtggagctgcagaattcaggggagtttgatgagatttatattatgatagccgatgcccaggctttgacagacaatgcggacaacccggaaaaggtgcgtcagaacatcatagaggtggctctggattacctggcatgcggactggacccggagaaatccgttctgttcatccagtcacaggtgcctgagctgtgcgagatgacgttttactatatggatttagtgaccgtatccaggcttcagcgcaatcctaccgtaaaatccgagattcagatgcgcaactttgaggccagcattccggtgggcttcttcacatacccaatcagccaggcagcggacattactgcctttaaggcgaccacggttccggtaggtgaggaccaggcgcccatgattgagcagaccagggaaatcgtccataagttcaacagtgtttacggggataccctggtggagccggatatccttttgccggacaataaggcgtgtctgcgcctgcccggtatagacggcaaggctaaaatgagcaaatcccttggaaactgcatatacctgtctgattccgaggatgagataaagaagaaaatcatgtccatgtttacggatcccaatcacctgagggtggaggatccgggacaggtggaaggaaatcctgtgttcatttatctggatgcgttctgccgtgatgagcattttgcagcatatctgccggattacaagaacctggatgaactgaaggcccattacgccagaggcggtttgggagacgtgaaggtgaaacggttcctcaacagcgtgcttcaggatgaactgaggcccatccgtgagcgccgcaaggaaattgccagggacattcctgctgtttaccgtatcctggaagaaggcagccgcagggcagagcagaaggcagcccagaccctggctgagatgaagagggccatgaagatcaattacttcgaggataaggaattgattgcggaacaggctgagcggttcagggctgagatggattaagcagattaagtataagagataaatggatgaaaggctccggcagaaagtgctggggtctttttccgttaaatggtacaatggaggaaagcattaactgaaaaccaaaggcatgacatagaaagaggggaaagagatggaaggagagaaggttgaaacagggttggaattccagatgaccaaaggtgaattggcggaatactgtgtgaacgttactgtaaaaggaatatggtcacaaaagctggccgtggcagtatttggaatgctccttttggcaggcgttggagaaggaatgcttatggctgtcatgggaaaggggctgggatatctggggggagctgtgttctgctggtgtctttttgcaggcggaatactggctgtttcgtgtattcttctgtattggcaatgcagcaggctgggattcctgaaacccagggcatacaaggtggaaaaaggatacttgtgttgtaaaaatgacaaaagcaggattccgtgttcctggtatacatatcgggctgaaactcccagggttttgattttgggaaggcctgctgcaagaaaaaactatgtgtttctggctgttcctaaacgtatgtttccggacagagaaactatggaccggtttttggaccaatttacagatccccaggcagtggaggatgacggacatgttgctgaaggcatttttaacttttattattttatggaccagagggcctggtcccacgcctggattcaggggatgcagatgggacttcgggtaaaaaaattatacggtgctaagaaaggaaaagtgttccgggtaacgggaatcgtggcagccttatgcggaatgagcattggtatgatagcggacagcgccatcctgacagcggtttttctgaccatgcttcttttgagttatatgaggggccatggtttgtccgagtcattttacaagaaacagatgatgagcggatggatgccgtcagacgggattggaaggtgggaaatttcgattggggtaaatggaatccgcatgaaaagagggctggcttttacagagtacagctgggaggattataactgcctggctgaaacagaggacacattctttttcctgaatacagagacagcacgcgggatagagtgtatcccggttcccaagtgggtgtttaaggacttgggggagatggatgcatttctcaacttctgccgtgataagggggtaaagtgggccggattggataaaacagcggacctgccaaagaatgacaggatgttttatatcctgctcttcatggtattattggctgtggtgatttccggcatcatacgggctgtatatttatgaatctgaggaaagacagggatgaggctcagagagttttttataaacaacctcttgactctgcccttaggtcagagcttatacttggaacagattcgaatcaggtaaacagaacatgaatggaggagcggaccatgctgaccataggacagatgtcaaaagtgtgcggggtgagtgtgaagacactgcgtcactacgataagataggccttttaaagccccagagaatagatgagataaacggataccggtactacgaggaccctcagattggcaccatgcttttgattggaaggctgaaacggtatggtttttcccttacggaaatccaggctctgcttaccatcccggacagcagggaattgctgcggcagctgtacaaacaaagattccgcctggagcggcagatggagcatatttccataaccataagggaaatggggtatcatctggaagaatttgaaaggacaggtgacattatgagttatcagaacaattatgagattcagataaaggaagcagaggaacaggttctcgttacccggagaaacaagatgtcagtggaggaattcggcacatattacgggaagatatacgaaaagattgccagggaacacatgaccataaacggagtggtaatggccatctaccatgaccaggaatttgacccggcttacagcgatatcgagctgggagtgggaatcacagagcgggataaggctgattttgtcatgccgggctgtctgtgtgcaactaccatccacaagggcgcctattcaggactgccggatgcctatggcgccattgtggcctggattaacgccaatggttatcatatgaatgggatgccttacgagatttacctcaagacccagtttgacaagcttccgccggaagagtgggagacagaaattttcttccctgtgaaaaaatagaggacagggagacggcaaaaggcttgccgtctccctgtatccattctgatgcatccacatgatttaccctggaaaaatatgtgtttcaattattcccaattaaaattctcccttccggcgccaatctcaaaatggtatttcacaattccggtattgatttgggacataggatgattgtcctttgtgcggatggatacggtattcccgtttgcttcgataaaaaaattctgtctgttaagaccggttggagcaagtacagccgcattcatgccatctaaaaaccatttatcactgcatggcttacataaacgttccatgctttttgacttatgctgcgtaccgtcagtggtgccgtaaccaatcgcaatgacaccaaccagttcctcatcaggagctaacgtaaccggacatttttttgcattgtatgtatttgtgacccaacatgaattaaggcctgcctgttgcgctttaaccataagccgcgctccgcagtagccgcattttatgtaaaaatcgccttgctttttggctgccagagcaatatagttttttacatttttaaaccgcccaaataagggaataaaggttttaaacgcctcctcattttccgttactaactgaatgtgcagctgtccctgccggttgcactgctcaatttcttcgctcagttcatcaataatctcaggggagagcggtttcgccgtataattccggactgcgtgccttgctctgattgcttctatttccgtcataatatgttcctcctcctttaacatatgtcacagcattactttgctgagcagtaacctctctgtaagagcgccccaatcaccgctgtcatactggacccccttcatgttggccatggctgccaggccatgtacggctgcccacattaccaaaaggtcatctcttaattcattttcatcaatgtttagttccctcattcctcttttcgcgccggttacaaaaatttcaaatggagtaaaagagctgttccatgtgatttctgtttcttttatttgtatgcccagatattcactgtcaaataagaaattaaaatagtgcggatactctgcaaaaaattccacataggccacgcccattgagattgtaatatgatggcagggattatcttcaaccgcctgtttcagagcggctgcaaatctgtcaatcacataagaatacatttcccggagcagttcgtccatgtttccaaaatgattatagcaggcagccgctgatacacctactttctttgccgcctttcgcagagaaaacttttcaattccttcctcgtggattaacgcaattccctgttcaatgagtgcttcttttaaattaccaaaatgatatggttttttcccgcctgtatctgtattcatattacatttctccatgttaacgtatgttaatatatagtatatctgatatgttaacacctgtcaacataaatatatacggtttgattttattccattttatgaagatatccttaatatctggagccctccattgacttgctttctttggtccaatatactggataatatagtaaatttcatttgggcagaggggaatggagggaatattgtgaagcaatgtggctgggggagaaaacgggccaagagagcaggcgttatggcgggaatccttgcgggaatctttggggtttcctggggtgcggcgggtgcgggcagggacggcaaaacgcacaggacgtatccggagccgtacctgcatatcagtttgccccgggatttggaattatagcccattcaccgtatcctgtatatgttctggaggatgaaaatggatatgctgtcagtaaggatggcgtgaaagtggaattagtgcgtgggatgatgcaggataatgagctcatcgctgagctgcgcatattagattacaggaaaaacagccagagggatgataggggcgcggattcctggatctatgatatacgctgctttggaccgggaataccggataccgggtatactgcagaacggatgggaacacacagcgaaaaccgggaaaacggggacggcggatacagggagacgctggcagagttctgtaccgtgtccaagaagattgatacggaaaaagggctggatggatattatttccggataggcggattggatgaaagcctgaatttttcctggactcaggccaagggttatgagcagatacaggatatggaaggtgctgttacacataagggcagatggatgctcacaagagcagtcccggcaggagaaaaggggctggcagttgagctttatgccttcagcgaaaaaaacggtgaacaggtggcgccgggccgaatcaatccattgagcagccagaaggaggaaatcacccttctgggaaaagataaaaagggttacaggcagatgggagaatcactgcccatggtgatgaaccagggggcggaggtggagtatggcatagatggatcggacggacgtatatggtactttgatgttccggcagaattgcagaagggaagctttctgctttcagtgccttccgtcaccctgatatcttcagaagaatccagggtgattactctgcctttgactggggaggaagccggaacagaagatgtaccgtacagggaaattgtaccggacagggaaatcctgtttcaggagcacggattggagatcgtgtcaataaaagccgcaggcgggaagggaacaatggggcggggaaggggggctgacggcggtgagaggacggaagaatccctgatttgccgtctggagctcagtgggcaggcggcagaaggcggcgggcagatggagatggtcctaatgagggttaaaacaaagggggcatcggacaaggcggaatggctcaatgtaatgccggagaaggagtccatatcggacccggacctgggcggccgttttatatttaatctgccgtatgagaaaggggatgactccatcacattccagctctggcatccgtattatgtctgggagcagtcttttagtctggaggtatctgtatcctgatagatacgggagcgccaggggatgctgggctggcagcaggaaagaacagtaccgcaaggatattgggaggctatatggaaggatacggaatcacaagaggcaggttaagcagataccggcttttctggacaaagaatatctatgacagacagggcgcagagcagatgtttttttccgcagtcagagagaactgtgcttaccattacaggcactgccgggaatacagaaaaatccttaagaggtcaggattccggccgggacacttggaaagcagccgggatatagggagaattcccgttctgcccaccctgtttttcaaacatcatgacatacactccattgccccggagtgtacctggcttaaaaccacatcctccgggacttcaggaactgccagccaggtgaattttgacggcggcgctctgctgtgcggtctgggtatggtggcgcgcactgtatcaaaaaggggattattgtctctcagaccggcccgttacgttatattcggctatgaaccccacagagataaccgcacggcggttgccagaagcactttcggggccacttttttcgcaccgcctctcagcagggattatgcccttatataccgccagggacagtatatcccggatctggagcatgttatggaccggctttgccggtacagccatggggccgtgcctgtgaggatactgggctttccgtcttatgcatattttgtcttgaagcagatggaggagcggggaatacaccttacgctgccggggggatccaaaatgattctttccggcggctggaaacagtttgagggacagaaggtgaacaaggaggttctctatggacttgcgcgccgtgtgcttggaatagaggacaaggatgttgcggaatttttcagcgcggcggaacatccggtgctgtactgtgattgcaggaaccatcattttcatgttccggtgtacagccaggtcatcatacgggatataaagaccatggagcctttgggatatggcaggcctggtctggtcaatcttatcacgcctatgataaaggcggttccggttctgagtgtgatgacggatgatgtgggagtgctccatgtgggaaaggagtgcggctgcgggattgacgctccttatctggagcttttggggcgggcaggggtaagcggtattaagacctgcgcggccggggcccaggatatcctgaatggcacatatgggaaggaggctgccaggtgattctgtttcagggaagggtatatgataccatgcttcagggagaactgctggggcagttggaagcccgaatcaatgataccaggctgggacgcggactggagcaggaaagggtcattcgcgggctggttcggttggggcaggagctgagagaggaactggagaacgctgcgccgggaaagacggccggagaagccggaaacccgtggataccggcctggctgggatgtctgacccggtttctcagccgggaatggctggaatataagatagaaacagaactgggagtaaaggcaggcaaagggcgaaaaagtgaaccgggaggcagtacagagtgcggacctggccctagccatgaagtatatcattatacggaattacaaaaaatggagactcatatactccccctggggacgctcctgcacataacagccggaaatatggaagggctgcctgtattcagcattgtggagggactgcttaccggaaatgtgaatatattaaagcttccgggcaatgatggaggactgtccatggatattattttgcgtcttatccgtctggaacccgctctggcggattacatttatgtctttgacacctcgtccggggacctgcctgccatgaggcggctggaagaaatggctgatggtattgtggtatggggaggggattcggcggtggctgctgtgcgcagaagcgcgccgccaggaaccagactcattgaatgggggcataagcttggatttgtatatatctccggttatgagtgtaaggataaggagctgtctgctctggctgagcatatagtgtccacacggcagctgctgtgcagttcctgtcagactatatttctggatacggagcgtatggatgatgtgaatgaattttgccgggaatttcttccgtatatggagagggctgttctttcctgcccggggcatgtatcactgttatcactgttccagccggacattttacagaaagattccacggtccggcccgtggaatcccggtttggctctgtgaatatgacagaggcagccctggcgcttcagcagcataatgacaggatggaacagatggcgtatggaaaaaagaaaatgaggaagctgtatccgggaaagggctgcagccttacggcctgcggggatcatgagctggagctgtctcccatgtttggcaactgtctggtaaagcgcctgccgcaggggcagctgtttggttgcttaagacgccataagaggtacctccagacagcaggactgatttgcagggaggacaggcggactgagcttatgaagactctggcgtccggcggcgtggcgcgtattaccagggcaggaaccatgtcatcgccatttgcgggagaggcacatgacggggaatatgccctgcgaagatatgtaagatttgtcagccaggagatgtaaatatggataaggaaccacagggaggatagggaggttaatatggagctggaataccggtttgccggcatggatgaattggattttcttgtgcgtatgcggataagggatttgaggatgttttctgaatgtgcggcaggaacaaaattggaggatgccatacgaaggttttatgaaattaaaatgaaggaaaatgcctgccgtacgcttttagcatatgcgggcagggagctggcggccacggctaccctgtatttttacgatgtactgccttccaatgagaatcccagtggaagagtgggacagataaccaatgtatgggtggatgaggcattccgacgtcagggcattgccacccgcatggtggagaggctgatggaggaggccaggggagaggccaaaatggtgtgcctcaattcctcagaacaggcacttggtatgtatgagaggatggggttttcctctaaaaagggatatctggtttactatttgagctgatggtgtgaaaaattgcggaacgtaggttaagcaatggcagatggtgaaatagggagattgaaagggagaaaaaaggaatagaggatgggaaaatgggagatggtgaaatgaaaaatgatgaaatgaaaggtagtgaaatgaaaggcagtgaaaggagaggcaggaataccggggaaccggtaaagcgcctgctcatatggggcgcaggtgaccagggaattgtaacactggattgcgcattggccatgaaccagtataggcggattgattttatggaactgaaagaaaaaggacaccgtgccattccggaatatctgatccgcagggaagacgatggattggaccagatcctgaaatcctatgatgaggtcattgttgccaccggcagcaatgaactgcgcgaaaagaaaatatccatgcttgtatccctgggaattccccttgctgtcatcatacatcccacggcagtcataagccctttatccaggatagcaaaaggctgcaccatacacccttatgccgtcataaacgcctatgcatccataggaacaggctgcatcataaatactcaggcagatattgagcacgactgtgtggtggaggactttgtgaatgtctgtcccaaggtctctatggcaggtcatacggttgtgggaaggaaaacttttttgggaattggctgcaccatcatagatggaatcaggattggaacggaggccactgtgggagcgggagccgtcgtgatccgggatgtgccggaccacgcggctgtggcaggcgttcctgctaaagatataaggaaaatctagttccggcggctgtgatgccggctgccgtgacagccggtttcctgactgtccgtctgactgtgggaacgcttggcaggctgtgaggaattgtcagggaacttatcctggaaatctgcctgggattcaccctggaagtctgcctgggatgattccgcctgcgattccgcctgagatgattcttcctgagattccgcctgggatgattctgcctgggatgattccgcttgagattccgcctgggattgcccctgtagttccccacgtattctctgctgccggtgttcacagtgttccgtgtggacctttatctctttcatgctcttatccttgaattcatccagcgtggcctgggggtccgcggtgagaagctcctgtatggcgtaatactttcccagcgacatcccgtgttcatgggcttcctcacacatatggctgtccacgctggcatactctgcctttacgccatggcactgcattaaggctgtgtttacacactcctgaaggcttgagaacatttgcgggtcgccgtcttttgtttccagcgtgatggagaccagggcgtctttttttagatactgctgcatagcatcgctggccagcaggagcgccagtgcctcctcatattccagatgtttaagcgaaagggactgcaggacagtttcgctttcttcaccgtaggtggtctggtccaccacctttccccagcagttgatgtccagttcaatgctgggatttacgtctatgctgatgacggctgcttccgtgtagtacaggctgtaaccgcccaggccgctggtggcaaagagcaggagacaggcaagggataccgcccacttcattctgcggggcgccggctttctgctgcggtgcatgtgttttatcacatattcgcaggtccgtcccttcaagacctcatcacagctgactgtatcaaacgcatcatgtatactttgtttcaccctcatcacctcccagcatttttttaagctcggctttcgcccttgacagatgtgtatatacggtattgacatttttatgtaaaatacctgcaatctccacggctgaatagccctcataataatgcagatacacgatgattctgtatttatcagaaagattcatcacggactccagcacatgggacaggtcctgactttttgtatcagccatggacatggcctcttccagagagcaggtgtgtgtccggaagaaactgcggagcaaatctttgcacctgtttacagtcacacgaatcagccatgcttttttatgttcctcagaatcaaagggttcagaaaaaagggcgtatttcaaaaacacatcctgaaacacgtcctctgtatcactttcatttttcatatagacaaagcagatatgttttaccatatccgcgtattgcccaatggtctgctctacatctgattcctgccgcatagccgctccatatgtccggtactgccaggtgcagtactgttttccctatctgtgatgtgaaccgcagccgcgtctgccatgatggctgtttccgctatggcatccataccctgaggggtccgatgaggatgtccgtccatggttcccgtccgggcatacccaatccccgtcctctgaccagtggccttcacagtctccgtgttcatggctcctgcagtattcgtagtccgtacagtcagcatatcctctgggacaagtccagtcagcaccccatgcaaggctgctgcccgctgcggttaagagaatgcctgtggctgctgctgccattatagttctgattttcatgtttttcaatctccttttttgattcattcactattaatacgattgagtcgccggaatcctttcatttatttttgtttttattttttaaatctgcttttcattttttaaatctgctgtgcttgtgaaatatccttgattttggtatacttatctgacgtacaggattaagacacattggacacactgtcctgtaaatatataatacataaaaggaatgaactgacatgggtacctggaattccagaggtttaaggggctctacccttgaagatttgattaaccataccaacgatttgtacagggaaaagaagctggctctgatacagaagataccgactcccatcacccccattgaaattgacaagtccagccgccacatcaccctggcctattttgaccagaagagtaccgtggattatatcggggccgtacaggggattccggtgtgttttgatgccaaggaatgcgcggtaaagacatttccccttcaaaatatccatccccaccagattgaatttatgggggaatttgagaaacagggcggaattgcatttatcatcctctattttaccggcctggatgaaatatattatctgccttttgaacagatagagggatattggaaacggatggaggagggagggcgcaaaagctttacctacgacgaggtggacaagagctggcgggtccgttcccatgccggttttctggtccattatctggaagaaatacaaaaagacctggacagaaggtcataggaggttttgcgtgaagcgccgtgccttccatgctgcctgtgcaggtcctttcttggtccgtacgtctttttcatatcctgtcttctaatcctgttttcacaccttcttttatgcgttcctttcagccccatcttccgtaccaccccgcataccaccccgcaggtacattttcattgaccagccctgtaaataaaagtataataaggtatattgcacgatgggcagaatggaattttaaaactgctttggggacgcgaaaatatgattgacagctccatggttttcctctataatgaaacaatcacgttaatgaattaacactttaccatagaaaagcaaaacggggtaaatgtgcgagaaaacataaaggcagggaacaggatggcagggaataatcgtttgattcatacgccggagggcgtaaaggacagttataacggagaatgcaggaaaaagctggcagttcaggacaagattctggataccttttatctgtacggatatgagcatatccagactccgagttttgaatattttgatattttcagcaaggacaggggaagcgtgccggacagggagatgtttaagttctttgaccgggacaacaacaccctggtgctgaggccggatatgacgccggcggttgcgcggtgtgtggccaagtactttatggacgatcccatgcctcttagactctgctacctggaacgcacttttaagaataacagcagttatcagggccgccttaaggagcgggctgagacaggggccgagctgattggggatgattccgaggatgcggatgccgagatgattgccatggtcattgacagcctgagacaggccggccttaaggagttccaggtggagctgggccaggtggccttttacagaagccttcttaaggaggccgggctggaggaggaagttgaggaagagctgaatcagtacattgaaaataaaaattattttgccgtggagggtctgctcaagaaccagcccgtggacgaagggcttaagaaggtttttctgaagcttccggagctgttcggctccctggagcagatgcaggaggcgaaaaagcttaccgccaatccgggggcgctggctgccattgaacggctggagaaggtacattccattttggagagcaggggactggaagcctatgtgtcctatgacctggggatgctcagcagataccagtactatacaggtattatttttaaggcatatacctatggaaccggggattatattgttacaggaggccggtatgacaagctgctggtgcagtttggaaaggatacgcctgctgtgggatttgtgattgttgtggaccagctgatggctgccctttccaggcagcagattgatgttcctgtgacgctggtgaacacggtgatactctatgagacttcggccagatcccgggccctgtggctgggcagctatttcagggacaaggggctggccgtccagtccatgaagaagaaggagcaggtggcgcttgaggattacaaggccatggcaatacagaggggcatgcgcaatgtcctgtacctgaagggggacgggaccgtagtgacagccatggacacggtgaacgggaatacagaccagatacccattaccgcttacgagtaaacgcagggaggccgtgaagaagatgagatatttgaccatagcgttagccaaaggaaggcttgcggacaaagccatggagatgtttgaggcaatcggcatttcctgtgatgagatgaaggataaggcttccaggaagcttatctttgtaaatgaggacctgggagtgcgctttttccttgcaaaggccaatgatgtgcccacatacgtggagtacggggcggccgatatcggcatagtgggcagggataccatattggaggagggccgcaagctctatgaggtcatggaccttggggtgggaaaatgcaggatgtgcgtctgcggacctgaatcagccagggaaaggctggagcaccatgagctgattcgggtggccaccaagtatcccaacatagcaaaggactatttttataaccagaagtatcagactgtggaaattattaagctgaacggttccattgagctggcccccatcgtgggtctgtccgaggtaatcgtggatattgtggagaccgggtccaccctgcgggagaacggacttatggtgttggaggaagtgtgcagcctgtcagccaggatggtggtaaaccaggtgagcatgaagacggaaaatgaacgcatcacggccattatcaagaaattccaggcatatcttaaggagaatgccggaaggtaggtacaggagcaaagtcaggaaagcggaggaatgttaggcatgagaatcgtgacattagataataagtccatggagaatattctggcggacatgttgaaaagggaccccaataattacgacagctatacccagaccgtacaggccattgtggacgatgtaaaggcaaggggagacgaggcgctgtttgagtatacaaagcggtttgacggagcgtccctggatgggagcagtatacgggtgaccagggaggaaattgatgaggccatgaaacaggtggaaccgggccttttaaaggtcatggagaggtccatggacaatatccgccgttatcatgagaagcagaggcagaacagctggtttgacgcccagcctgacggcaccatcctgggccagaaggtgactgccttggagagtgtgggagtgtatgtgcccggcggcaaggcggcatatccttcctccgtcctgatgaatattattccggctgaggtggcaggggtgaagcgcatcgccatggtgacgccgcccggtaaggacggaaaggtaaatccggtgactctgacagcggcttacatggcaggagccacagaggtctataaggcaggcggggcacaggcagtggcggccctggctttcggcacggcatccattcccagggtaaataaaatcgtgggaccgggcaatatctttgtggccctggcaaaaaaggctgtctatggccatgtgagcattgacagcatagcaggccccagcgaaatcctggtgatagccgatgacagcgccaatccgcgttttgtggccgcggacctgttaagccaggcagaacacgatgagctggccagctctattttggttaccaccagcatggaactggccaggaaggtatccgacgaggtggacggattcctgaaggtgctgtcacgcagcgacatcattaaaaaatccctggacaattacggttatatcctggtggcggaatccatggaaaaggcagtggagacagccaacagcattgcgccggagcacatggaaatcgtcaccaggaatccctttgaggtcatgaccaaaattcagaacgcgggcgccatctttatcggtgagtacagctcagaaccattgggagactattttgccggccccaaccacatcctgccaaccaatgggacagccaaatttttctcgcccctgggcgtggatgactttatcaagaaatccagcattatctattattccagggaggcccttgaggcagcccataaggacatagagacatttgccgagtcagagcacctgacagctcacgcgaattccgtcagagtgcgttttgaacaatagcagggaggtatgacagttatggaacggattgcatccatcacccgggacaccaatgaaacacagatatccatgagccttaacctggatggctccggcagggggaatatcaacacaggcatcggattctttgaccacatgttaaacagctttgcgcgccacggcttttttgacctggaccttgcggtaaagggggatttggaggtggatacccaccacaccatagaggatacgggaatcgtgctgggacaggctatccggaaggcggtaggggataaaaaggggattgtgcgctacggctcccaaatcctgcccatggatgaatccctggtgctctgtgccctggacctttgcggaaggccctacctggtctgggacctggttttggaccgggaaaaggtgggggatttggagactgagatggtgcgggaatttttttacgcggtttcctatggggcggagatgaaccttcatttgaagcagctttcagggacaaacaaccaccatatcattgaggctgcctttaaggcattcgccaaggccctggacggcgcagtggccgcggaaccccgtctctcaggcgtgctttccaccaaggggagtctttaggatggaagatatgcctgccctgtcccccggagcctgcgtccgaagacatggagaaaataatagaataaaaggagattcatatgcagttatatccggctattgatatgaagaacggacagtgtgtccggttaagacagggggcatttaaggacatcaccatatactcggacgcccctgaaaaggtggctgcccactggcaggagaagggggcatccttcctgcatctggtggacctggacggcgccctggcaggttattctgtcaatgaagaggtcatacgaaggattgcggacacggtttccatacccattgagattggcggcggcatccgttccaaagaagcagtggagcgtatgctggacctgggggtcaggcgtgttattatcggaacaaaggcagcggaacacccggaatttctcagggatatggtcagaacatttggcgaggaggccattgtggcaggcgtggacgcgaaggacggcatggtggcagtggaaggatgggagaaagtcagctcccttaccgcctcggacctgtgtcttaccatgaaggaatacggtgtcaggcacattgtctataccgacatatccagggacggcatgctgtccggccctaatgtggaggctacaaggaagcttacagaggagacaggacttgacatcatagcctccggcggggtatcctgtatggaggatttaaaatgcctgcatgaggctggtatcaggggagccatcatcggaaaggccctctatgagaaccggattgatcttgctgaggctgtaaggctttatgaggcttaagtaccagagaaaatggagagattcaaatgactgattgcaagaagctgattatgggatttggttacaggaatggaaagactttttcctggaacggaaagcttgagtatgagggcgggcttaaggagcttgccaggacagcctgtgacaacggggcagatgaaatatttatctgcgaccgttctttttcagatgaggaccatgaggctgtcataggcgccatcaaggaaaccgcccgcaccgtggatgaacccatactggcgggaggacgaatcaggcgcctggaggatgtgaaaaagtacctttacgcaggagccagcgccgtattcctggatgtgagctatgaagacaacgtagatatgatgaaggaggcagcagaccggtttggcagtgaaaagatttatgcctatatgccggacctgtcctatctgaaccgggtggaggaatacattcagctgggcgcgtccgtgatgatatgcagggcttccggtccggttttatccctggctgagctgggtgaaatcggggagatatcctgcagaagccttattttctgcggcggtcatgaaaatgtccaggagatggccggggatctgaagctgagtctggggtgtccccaggtggagggcgctgtcctgactttggcggaggataacctggacaaggtgatggagctgaagcagattttaaaaggtgcgggtattgtcacggacacctttgagagttcgctggaatggaagaatttcaaactgggaagtgacggccttatccctgtcattgtccaggattataagaccctggaggttctgatgatggcctatatgaatgaggaatcatttcaggccacactggcgtcaggaaggatgacctatttcagcaggagcaggcagaagctgtggctgaagggtgagaccagcggccacttccagtatgtaaaatccctgaagattgactgtgacaatgacaccattctggcgtcagtaaagcaggtgggagctgcctgtcataccggaaaccgatcctgtttctttaccacgctggcggagaaggaatataaggaaaccaatcccctgaaggtatttgaggaggtatttggggtcatactggaccgtaaggagcatccgaaggaaggctcatacaccaattatctgtttgacaagggaattgacaagatacttaagaagctgggagaggaggctacggaaattgttatagcggccaagaaccctaacccggaagaaatcaaatacgagatttcggattttctctaccatatgatggtactcatggcggaccgcggcattacatgggaggaaatcacggaggaactggcaaaccgttagcggcgggaaacaggggaagtacagacacgccttggtaatataatgccggtaatataataatgaaaatcgcaggaggtaatggagaggtggcagaaatatcggaggttacagcgagactgctggattacgtttcatacgacacccagtcagaggatgacagggagtccattcccagcaccaagaagcagtttgaactggcgcataagctggccggggagcttaaggagctgggggcatcccaggtgaggataagtgagcagggatatgtgtacgcatgtattcccgccaatctggaggagggaaaaacatgtccctccctgggctttatcgcccatatggatacagcgccctccttctcgggcaaggatgtaaagccgcagttcatccgggactatgacggacaggacatctgtctgaacagggaacaggacctatggatgaggacagcggattttccggatttgaaggcatatgagggcaagacgttgattactacggatgggaccacgctgctgggagcagacgataaggccggtatcgctgaaatcatgaccatggccgcctattttcttggacatccggaagtaaaacacggaacaatctgtatcggcttcacaccggacgaggaggtgggccggggagcagacggctttgatgtggatggcttcggggctgatgtggcctacactgtggacggcggagcgctgggagagctggaatacgaaaacttcaatgccgcttccggcagggtgacggtccatggggccaatatccatccgggcacggccaagggacgtatgagaaacgccctgctcatggcaatggagttccagtcactgcttccggcaaatgagaaccctatgtatacagaagggtatgagggtttttatcatctggacaggatgacaggctgtgtggaggaagccaggatggattacatcatcagggaccatgacagggcgaagtttgagcgcaggaaggaattgttttcccaggcagcgggatttctgaaccagaaatatggttccggaaccgtggaggcagcggtgaaggattcctattataacatgaaagagaaaattgagcctcatatggacctgattgataaggccaaggcatccatggagaagctgggtatccagccaatcgtggttccgatccggggaggcacggatggagccagactgtcatatatggggctgccctgtccgaacctgtgcacaggaggccataatttccatggaaaatatgaatttattccggtacagtccatggaaaagatagcagagcttcttatagagattgccaggtcgtttgcagaagcatagcgttggtttgttctttcctgatttaacaaaagaaacatccctcccgcctgtaaagggggagggatgaattgcaggaaacaaacttaacggcagtgccgggcgcggattgaaacaattacggaagacgcagcatatctctgtcttccggatgcaccagcaccttaatctgtgtgatgccggcggacttataggaatgaagctgccgtgcctttaaatcctttaaaaacaggtctttgtttctcataaaacgttcaaagtcatcggatatatcataactgcctatacccacatagctgccctctgagtattccacataggggcggacagcggcagcgttataggtgacctgaaagcggattatgccgcggggaacggagtcgtcagccacaatatcctcttctgattcaggcaggcggtctgtccggataatatccagacaggtatcctccggggattccagttcagatgtctcctcagagtgatgggactggcccatatcataatccaatatttctgttttcatgtcaacagggcctgcatctgcatcgcccatataggtaaaggatgaaaactcggaaaatgttattccggtgcccaggcctgcggcgaaaacacctgtgcagaacagggctatcatatatgactgcagtttacgcatgctgcacctcctctgaagtgttctggtccatgtccgtggaaagggcggtgttcccggtattgcggcggagccttaacaggcttatgcacaggatggaaaatgagcctgcgcagagaacaacacccaggcttagcagggcagggcctgcaaagggatatccctgaaccgtccataccagaaatactgccagaagatataatgaaaacagggtaagacatccattaaacaatgtcaggataaaaagcagaatgttccaggtccagcgcaagcaaaagtacatgcaccacagggccagggaaaggcaggaggagaaaagaactcccagaccacataacataccctttatcacgcggcatatggatgatccggcgcgtttaaatgcgtttcgcaccgtattttggacagtgctttggtcatggacatggtctgtccttggaacaggcggtatcctgggaacgcctgtctgggagtgttcggatgatggtgtgaagtctgctccgtttatatttacaacctccatctttgtcctgagatgacggaggaagcggggccggcgggccggaatccgcgaaaagaagttccgtgttcttctgaacaggacaccggtattccgtacagctgccgctgctattctatgtaagaaccgtccggctgcccgggcaatacccagaaagccggatcgggccctgcggattaagtctctgactctcaaaacgggggatagggtccggtttccgttataatccgggtttacgtggtatgcctccagaatctctgccgccagctggccgagatcaccgaaatccccgatggcttcctcctcgctgaggcccctttccatcttcatgtcaatatgctgggtgtattcctccagaatatcctgctgttccttttcttccagcacagccaggccgttcttaagttcatctaaaaactctgttttattcatctccatgctcctttaaaaatgtacatactttctgctggaactcgtcccattcccgctccagaacatcccggtacaggatgccggcggcagtcagatggtaatattttctgggaggcccttccgtggattcccgcaagtatgtttcaaaataatgttcattggtcagtctctttaagagagggtagatggttccttcattgacatcaatgaccttggatacttcctctaccagttcatagccatacatatccctttttcgtactgattcaaggaccaccagctcaaggactccttttttaaattgtggattcatggtcagtaaccctccttgtgattactatattatacatactactatgtattgtcaagtactataaataaattaatacttaacttatccttaacaaatctttccaaagcctgtataatgattacgtagctgcatttttagaacaataagacctcaggggaggggagacatggagagaatccgtcaatttctcaataagaatatttatatattttcagtgcgtcaggggcttttgctgaccattccatttttgattctcggttccttttccatggtcattatgcagtttccgctgaaggcctggcaggagcttttgcctgggtttgcagggggcagtgtgaagctgctgctcatggctgtgtaccaggccaccttcggctccctttcctttatctttgcattaatgatatcctactcctatggggaagagcagactgtgtataagaatacccatatatttttcccggcagtggccctgtgctcattcattgcatttacctatccatcaggcgggctgtccatatgggggccggagtggagctttacggccatatgcattaccctcatcagctgcttcctcctgaccggaatttaccattgggtggagggataccgtcatctgtataccatgggagtggcctataatttcaacgcctctatgcagagcatgattcctgctgttgtcacgattgggctgtgcgggctttccggcctggttctgagtctggcttttgacgatgtgaatatcatgaatttcggttcttatctgtttctcaagctgttcggccagatgggaaacggcctgttttccatacttttatatatcctgttgtcccatgtgctgtggttttttggaatacacgggaccaatacgctggaggctgtatcccgcaggctgtttgagtcagaggtgacggccaaccaggctatggcagcccaggggctggtgcccacccatatgttcagcaaaacgtttctggatacctttgtgttcatcggaggcagcggatgtgccctgtgcatggttctggccctgtttcttgctgccaggaagaataataaccgcagactggccaaactttcccttcctgcggttgtattcaatatcaatgagttggtattgtttggatttcccatcatattcagtgcagatatgattctgccttttatactgactcctatggttctgtcggtcatcagcagttttgccatgtggtttggcctggtgcccgtggcttcccggagtgtggaatggactgtgccggtgcttgccagcggctatctggcaacaggaagtgtaagcggaagcctgctacaagcctttaacctgattgtgggtaccatgatttatattccctttattaaacagagcgaacgggtccaggaccgtgaatttctgggaaaaatcaagagactggaggcatccatgaatgaggatgaacgctcggtttgggtcagggatttccgctggaatacctacgaaaaccagcagacagccaagctgctggcgtcagacctggaatatgccctgtccaagggagcgctggagttatactaccagccccaggtgaaacgtgacggaaccctctatggatgcgaggcactgctgcgttggaactacatgggccagggctttgtgtatccgccccttatcattgcgctggctgtccagggggatttcatcggatctctgggcatgtatattgtagagaaggcctgccgtgacatggcgggggcgcacactcaggcaggctgcccggtatccttttccgtaaatatcctgcctctggagctggaggatccgtcctttgcagatcatgttttgagaattttgaaggataccggtgtggagggcagtaatttgaccattgaactgacagagcaggtggcgctgaatcccggccccaatctggaacgccagttggagaaactgagagagtcccgggtgcgtatcagcatggatgactttggaatgggccatggttcccttaactatctgaattctgcccattatgacgaggttaagattgacggatcccttatccggcgcctgccggaacatacccagacatgtgaactggtgggcaacattatgaacatgtcccggattttgggagtcagcacagtggctgagtgcgtggagacgccggagcagattcagatgctggagaagctgggatgcagcatttaccagggatactattacagcaggcctctgccgctggacgcattcattgagtatgtgaaaggtctgtagtgtgtgtctggagctggtggtttccggcagcctgggagtacagctgagcgtgtcagtccagcctggagagcacgtctgacagtgtcagcacagcctgctccagccgctccatatcatcagaccccagttcctgtttcagtttatctgcaaaagaggtgtctttataaatcgtatttatcatataatccttggcgcgttcagtcacttctatgacgatgcagcgccggtcgtgttctgttggaagccttctgacaaagtcgtggctgcacaggatttctatgagcttggttgcctgttgtttgctgacatttaagtgccgggtgagctctgtcatggtcatgggacctttgcggagcagtacctgcagacagtaataggtttccagactcatcttatccttcataaatgccttgaagggtttatcaatcctgtaatgccaataggggagcagacggagcagttcctcggtgaagtttttgttattcattttctgacctccttgatccatctgcagccattctgctgaaggccgggataaagccggcgggataaagccatcctgcgcaaccggatagggccgccttatccggtcattgacaaacagactggatatgtttataataattagtaaaccaaagtggactatctattaaagtgtacttaatgactgcttttagattacaacatttttaaaacagaatcaaggggaagaaggataagaatggcggataatgaaaagaaaaagagaactttatgggaacaggccgtggaaaatgcgctccattttgcatttaacctggcctttgtatttatatttcaatccatatttggtgtacagaatgtgcttccgggggtggctatcagtgtgggcatgaccatgttcccggatggatatatcggggtgaggcccgtgaccatggcggggattatcataggattgtactgcggctgtgttattgccgggcagacagccctgatgctgccggcagcagcccttgtgattgattttctttttgtccttcttattatggccctgacctgtgaacccaccatgtacaaaccagctatcagtttcctgctgtgcttcgtgttcgcacagtccacacctgtaccgccagcggcatttcctatgcgtctggcaggcgcagcagcaggtgctgcagcggtggcggttactacggttatcaagtggtattggcagggacacgggaaggaaggacgcggtttaaaggaacagataaggctgtgcacggtacggaaaggctatatattgcggatgtctatggggatatcggcagctatgtttataggtatggtccttcacctgagaaagcccctgtggattagtattgtggtaatgtccctgactcagctgcattaccatgaaacattggagcgcatacgtcaccgttttctcggaaatgtcctgggcattctgttctttgtggtggtattccgcatgctggtgcctgagagctgggcttttggcatggtattgtttttgggatatatcagtttttttacctcagaatataaatataagcagattgtcaatgcagtgagcgccatcaacgcgtctctggtgctcttagatacatccacggccattgaaaacaggcttctctgtctggcaggcggggcatgcattgtgctgattctgtatctggcgcagaaactcggaaggggaatcatgggccatacaggagctgcggcggcctgccgtacaaagtgatgtgggagtgtgaacctgaaggtacctgcagcttggctgttatatcggaatcacaggatggatatgcgatgatcggaggaacagggaatgaggaaagcatagatgtacagggtacgttatctggtggaaatagaagacagaggggattgccggtttataatcatttgaaaaacaggagagaatatgggaaataaaaaagcaggaagcagcgaagaaaggctgagcgtattcctgagtcttgtgctacggcatcagccggaagcagccggtatcacattggacgaacacggctgggcagatgtggaggctttgattcagggcatcagcggcacaggcagaccgatggatatggagctgctggaggatatggtcaggacggatgaaaagggccggtacagtttcaatgaagaccggactctgatacgcgccaaccaggggcacagtataccagtggatgtggagctgacagagacaacaccgcctcaggtcctttatcatgggactgccagccgttttgaacaggccattctggaacagggcttaaagcctatgagccgtctttatgtacacttgtccggggatgccaagacagcattaacggtgggaagaaggcatggaaatccggtggtatttgaggtggactccggccgcatgagccgggatggtgaacatttttacatatcacaaaacggggtatggctgacaaaacgtgtaaagccggaatacctgaaacggaatatctgaaatggaatatctgaaatggaatacctgtaaccgatgagtaaagacggatgactgtaaaaggtccaaaacatgaaggtgatgcattatgaagaacccgaagcgccgccgacagggatatttgaggagatggctgcgggccggtgtctatgcaggcggacattgtgaatgctgcaatcagccgcttgtccttattttcagatacgatgctgtctgctgtccccaatgcaaccaatggattgatgaaaaatgcggtgacccggactgctgtttttgcggcagcagaccggatacaccggcagaatcattgatatatgaatgcccgactataggcaaagactactatataaaaaagtatgagaagagaaagcggcagtattttaaaggcatgggggaccgtgggcaggccggatgggaccgcccgccctcacacccgctgcccgtaaaaaggaacctgtgaaaattgaaccatcattccacatcctgctttaacagggccacatagccgtccacggttcctgcgggctcatatccctgttcccggcagtctgacagaatctgttccaggtccttttcataaccctttcttaagtccaccaccatatagtcagccggatggctgcttgtgagaagatagacttcatcccgcatggaaagctgggggaggaagaaggtggaggattttacagaggcatccgggggaatctggtccagaagagtcctggcctgggcagcttcctcatgatggcggtgatacaggacggcatattttgacttactgtacatcacgcctcccatgaggacgaggccgcacagcaggccccaggcacagacagtggccggaagccgtccgtcatacccgtcacctcctttgcgcctgcggccgggtgcattttttatatcccggaaattcaccaacgccagataaatgagcagggctcctgaaccgtaggtatactgaaagtatatggagtgctggtatatataattggacatcaggttgatgagtacaaaggggatgagcagtgtccatttctgccagtcttttgtcatgagcggaaggaaacccagcggaaggagcatttcaaggaagaacatgattttatccttcaccgcaatctgggacagcacataggcaggattgaccagtatggttttaaacatgctggccaagcccagacgtttgtccgatatgaaattgtcaaaccggttaatcatggccccgtccccaaaccggttgatataccagacagccatgcagaaatatgcgcatgacgcaagaaagacaatggctccccaacggtactgttttttccaaaggaacaggtaaagtccgatacaggccgcatagacaggagcatcctccttcaccataaggagaagtgcggcagaggccagcatggatttaaaatggcctgtttccaaaaagtacatgcaccagagaatgatgacggccaggaatttattttcgtggaaatcgtaaaaacatccgcccataaacgccgggtaaaaacagtacatcagaccgaaacacagggtttgcaggcgggtgaagcaaaatgtcctggccaaaagacacaagggaaccattccgcttatgacaacaagggactggagcaccagcagggtctcaggacgggggactaatttgtaaaagggcagcagtacataaaagacaggtgagagatggaccgcaaaatgggataaaagcccgtcgcgctcacatgtggtaagaggagacaggcctttatccatgtagtaatacatctgtgaaaagattccgaaatcataagcagacgcgtaattcagccggtaccgcagcacggtcatgacggcggtgaacgagaaccagacagccgctgccatggtgaggattatcagcagccttttgccggtcagccattgttctatggtttttatcatagtataaatgtttcctttatcatcagagtggcaatgtacatgagcacgctgggagtcagggaaaaatgaatccgggagcggccgcagggaagtacatagggaatggccatgcagagaaagattccgagccagatgcccaagaagctttccagtgaaatctgtctcacaaagtccaatgtcacaaagggcacatgactggccaaaagaaacatggtatttgtcaacagccagctggccatggtcagttttccaaggcagcagcagaacagggacagctggaaatcgcgtttcatcatttgaatcataggttctcctcctttaaactgtatagtaatcatcccattggaaaatgtaaagatgcctgaggcaactgtaagaaaaattagaaaaaccttaataaaatctgccgttccggggagataagaacatgaggaaaaggacccgtatcatccaggacaagagacgcagaaccagatgtgcacagctggcagcggatgcctttgacgaaaaactgatttctgtcagggaagaagatgggagaacagagattatcatggagggcgatgcggttactgacatgtgcggcagcaccctgtttattcaggagccggatacaggggatatcttttcggagaatttaaaaatcaatctctattcctataggcccggggagggaaagaaactggctgttcctaatatctatggcttttatcctgtacaaaaaggtgagagtttctgctttaccaggctgggtgaaaatacggatggacaggccctgtgccgctgtcaggaatattcctggtatatgacagagggaatcggagctcagtatatgacggtggcaaaggtggacgatgtgttccagccggccgaaagccgtatgtacagatttgctctgacagacaataagctcagcagtctctcggaatgcgcggcagagggatatgcaattgggatgactattgtccgggaaccttgtttgtgtcgggagacaaagaagaggaatattttgcattttgcggcagttctcaggaggcgcctgatcttgtgaggctgactaaagcaggttcttccaaggtgttcatggagaatgtggtccagtgcgaaccatatgcaggcgtcactggttttttccagcatggcggggagaggttcatggatgcagttccaaaggaatgggactggagcgggcgggcgttctatgaaatgggcttcaggtccaccaggaccaattccggaggattataaatgcggggcagcctgttgatacacagcccccggctgacaatcagagatgtggaacccagggtatactgtccccctgcatatcggggaaagaagccttggtgaggcgccagaagcccgccagggcagccgggcatgcggaactgccccccatgggcatgaccggccacaatcaggtcaaacccgctgtccctgtaatatttggtgagctccggccggtgtgacagcaggatggagtagatgtcaggggaggtgcgggaacagcagcgccagaactgttccttccatcgggaatccagtttaacggagtggtgggagtcggtaaatgcatgagggtcatccactcctcctatgatcagaggctgccctttgatggctgttcggattgtccggcctccaaggacagtgaccccatatccggtgaacattttcttgatgtcaggtatctggtgaatccaatgttcatgatttcccgtaacatagtaacaggggtactgtccctttaaaccctctaaaagcagtaaagtccctttgtgggggactttgtgatcggcaatatcgcctgccatgagaatcaggtcggggctgtggctgtgtacggccgtcagcagcggctcctgggcgctgccgtatatggtgctgtgcagatctgttatcagcgctgcccgcaggtgctttgtaatctttttagagtattccgtataacggtgtactgtaagaccgcagtaaaatgggtttacagcatgtgtttttttctgcatatcaggctcctgtttactcatcatcggacatctcatagggcagcagctctgccagatagtgctttttcctcagagcctcctctatctcgtccagtatctcctcctgctcggcgcagacatggtggaagtggtagccggaagtgacattcatgagcggggtggattttccggtttttatattgttcatgaacagctgtacgtcgcggcggttcttgatgttgagaggagctgacatttttccgtatacccggtgattgaccatgacatccaccacggtcccgcccaggtccacgatggtgaccagttcatcctctgtctgctcattggtgtggcagaccttaaaaaaacgtgacgcatgcttggatacattgagaacatacccgcgggcagtggagagaatgggataccccatggtgcgcaggagagcaatatcctggaccaccacctggcggctgacacctgtttccctgccaagggccccgccggataaaggggcggaagccagcctcatcatatccagaagcttcctgcgtctctgcgttccgttcatcgcattttccatttctcattccctcctgcaaaacatagttacgatttaatccgtcagcaccttcaggtgcttcaaactgatatccagaatcggggcagagtgggtcagtgcgccgctggatacataatccacgcccagctccgtgacggtccggatattttcttttgtcatgttgccggagcactcggttttggcccggccgtcaattaagcgtatggcttcagccatctgttccggagtcatgttatccagcatgataatgtcggcgcctgcatccactgcgtcctttaccatgtcaaggttctctgtctctacctcaatcttacggacaaagggagcgtatgcctttgcagcggcaaccgcctccctgacgcctccggctgcgtcaatgtggttatcctttaagagaacgccgtcagacaggttatagcggtgattctgtccgccgccaatccgaacagcatatttttcaaaaacacgcatgcagggagtggttttccgggtgtccagaagctttgtccgggtcccttcaagcatccctgcaaccgtatgggtataagtggcaatgccgcttaaacgctgcagataatttaacgcggtccgttcgccggataaaaggacgcgcacatctcctgtgaccgtggccagatgctggcccttttttacttgttctccgtccctgacatcaaataccaccttggtttcaggatccagaagcgtaaatacgcgctcaaaaatctgtaacccggcaatgatgccgtcttccttgcagataagctgtacctgaccctttttatactcaggcatgactgcgttggtggatacgtcctcgctgctgatatcctcctccagggcaagacgtatgtatttgtcagcaataagctgcatggtaattggattcataatgtattctccctttctggctgttctctattctttttgcggcttttccggcaaacaccaggctttccaacaggctgttgctggccaggcggttctttccgtgaaccccgttgcagctggtttcacccactgcgtacagatgctccatggaggttctggaatccaggtccacccacacgcctcccataaaataatgctgggcaggcaccaccgggataggctcttttgtgatgtcataaccctcctcaagacatgtttcatatatgtggggaaaatgttccagtatggttttttggggtatgggcgcaaatgacagccatacatggcagcttccctcttttttcatctctgcttcaatggactgggataccgcgtccctgggcagcagctcattgacaaagcgttcgcctttgccgtttaagagcacagccccttcgccgcgggctgattccgagatgagaaaggacctgccgggcttttccgtgtaaaggctggtgggatgaatctggacgtaatccaggtgttccagctttacgccatgcttttgggcaacggtcagtgcgtcgcctgtgagacagggaaaattagtggaatgctgatagagccctccaatgcctccggtggccatgaccgtgtcacgggcatggatgaagagggagctgttgtcccttgtcctggcctggatgccggcacaggctccgtttgcggtcagaatatctgtcataacggtatattccatgatatccacattggggagcgcggctgtccgttcctggagtaccgtggtgatggccttaccggtgatatcctcatgaaaacagattctgggcctggaatgggcgccttcctttgtatattttaaactaccatccgggttcttgtcaaaccctaccccaagctctaacagatgccggatgataccggggctggtgcgtatcatcaaatccacgctttccttccggttttcgtaatggccagctctcatggtgtcctcaaagtacggctcatagtcatcctctccccggagcacacagatgcctccctgagccagcatggaatcacaggtatccatatcctccttgcatatcatcaggacatgcaggtcctccggcaggttcagggcagtgtataatcctgccaccccgcagcctgcaatcaccacatcacagtatatatgttttgtcatttcctatgcctccttctggaatcggctgcctgaaatctgcatcccggcagctaccgtgcaagcttaagcatctgctccagcgccctgccggctgacgggacataggcttcggggacaaatgcctggttttgccctgtgcgcaggacatggatgattttgtccagggttatctttttcatatcccggcagattggttctgtatcaggaaaataaaactgtttgtccggattctgctgttccagctcatgacgcacgccaatttctgtgcagataatgaattcccgggaggtgctgccggcagcatatttgagaatcccggtggtggaaccgatataatcagccagctcaagcacctgggcattgcattccgggtgggccagtaccagggcatttggatgtattttctttaagccggatacctccttgggggacatttggtcgtggacagggcagcagccttttaccagcatcacatgcttttcaggtacctggctggccacgtaccggcccagattcttatccggtatgaaaaggatgtcctggtttggcaggttccttacaatctgtaccgcattggcagatgtgacgcacacatcggaccaggacttgatttcggctgtggaattgatgtaacagaccactgcaaggccgggatattcttttctgtattgctccacttcctccttggttaccatgtgggccatggggcagtctgcctgggcgtcgggcatcaggaccaccttgtcgggactcaggagctttccgctttcgcccataaaggagactccgcagaacacaagcgttctgttttcaagaccggccgccaccttgctcaaatagaaagaatctcctatgtaatccgccagttcctgtacctggggatccacataataatgggccaggatgacggcatcctgctctgcttttaactgttttatttcttcctgcttagtcataatttcccctgttctgccggtattgcagcgccggcctttttaaattggctttttgtttacgtccgcaacagtataacacatatatttgcatgtgacaagacacatagggcgttaaaattttagcataacaaagcggtcggcgtaattgtaaggattattaaagaaaagttcagcactggaaaatggggatatggtagaattaggataggaattatgccggacgttttctgacgtggcgcagcgttctaaacgaggaggattaatatgaaaaaaatccatgaaatattaactcacagaaaaagaatctgcaaaatacgaattcacagaatgacagctccgggacttgcggcatgtcttgtgttcatggctgtaagcctggcggcctgccaatcagcggacagcgggaccgggggacagaaagagaacatcgcggctgtccgggaacaggacggcgcaggacagacagaccaggagaatcatgccgcaaaaggagaaaacgcccaggacacagggacaccccgggggcaggaaggtgtaccggatacaccggatatggaagccggacaggagacagccgcggagcagcagggggaggacggtttgatgacagcggaccagtggcagatggttcctggatacggcatatgcaaaaagggagaaccagtcctgtatgtattggacatggacgcaagccagatgaaaacagatgagaaaggagtcagcgccaggcttctttctgcggtgtttcaggacaatgtaatcagcgtcagggtgaaatttaaggatgataccgtgacactgataccggatgagaaggtaaaggagattctgaaacaggaggaggaaaaccggaaaaaacaggatcagggaattagcgtacaatgggatgacagttatttctgtattgacagcgaaaagaacatttacggccgcagtgcgtttcaggacagaatccgggcggagaagaaagagcagaaggcgcagggcgcaagggccgttacctttgaccggattaaaggaaagggtatagacggactgggctttacccggcagaggaacagcacatcttacaaagataatggaaaaggcggcttctatatatcccaagtgtcggagaataccataggtaaggacaggtttacactggatgaaccggagggggtctatgaactctggctgaacggctttaaagaccccataaaaatcgtctttaaaaaagcgcctgcctatgattcactggaggatataaagggaatggtgaaccatgaaggattttatgggatggcagagggaatcgtggaggaggacggactcaggcttaccacctatacctactcagaagatggatataggattgggttcagccgcggaaaactgatggctacactgtcagacggaaggactgccgaactggtccctgtgctgggggaacagctgaccacatccctggaccagctgtccggcatacagcccagaagcatccaggagacactttacaggagaccggagggtactgtggttacggaagcatccctgcatgcagagaaacctgttgtcatatcgccggaacagggaagtgtgctggaaattcccattcccggagagcggcagcctttggatatggtggtggaattcagggactgcaggatatatctgaccggcatcagtcccatggatgagctttatgaatatggtacggatgacaacggagaccctcttaccaggcatatggtctacatcaatgccagggcagagatgagggatgcggataagaatttgtactacgtaaatgcagtacagccggaggaaggccaggagggcagctccggtgatcccataaaaaccgtatacgcactggcggatatggcgggggcagataaatataacgcaggtgagctggccgggttcaaggcattatatgaggagggggaatctgtaatccgtctgcagcttcaaaggcccacctacggatggaaccaggagtttgtactgccggtacagatgtgaccggataaaaaggaggagactgtttgcagaatcttcttccttttttcttaattatccggttgtgctattgattttgcctgcttcatgtgcaacaatttatagatggattcagcggcagtatgtctgggccgttatcatgatggatatttaagagaggaacataaaatgagaagcagaaggagacggagaagatcaagggcggttattatcattcccctggttttggtgtgtcttatggccgctgctgcgggcatggcatttttatggtttgcaaagggacaggcgggtgtaaggcaggctgcgccggatgaacggttcatggagtatacaggatatctgaccgaggggaattacgaagccatgtaccggatgctggattccgggagccgaatggacatcagccaggaggattttatcaccaggaataagaagatatatgagggcatcggcgcctcctccatccgggtggatattaccggagtggaggaaaaggaggaccagggtattcagacggtcagctatgagaccagcatggagagcctggcaggcaccatccattttttcaaccaggcggattttaagctggaggcatcctcaggggctgccgggacagacagccatgacagtgaaaaggcaggaaagaaaaggaaggaagcaaaagacgaagaatacagattgatctggaacgaccgcgtcatatttcccaacctgagctggaacgataaggtaagggtcaccacggataaggccgtaaggggaagcgtcctggaccgaaacggtattatgctggccggaaagggaagcgcgtccatggtgggacttgtgccgggaaagatgagccgtgaggcagacaattattcagaggacgaaataaacatgctttcagagcttttaggtgtttccgctgacagtatccgcaaaaagctgtcggctaactgggtgaaggatgattcccttgttcccattaaaacattaaagaaggtggatgagctcaatctccaatccgctctccctgaggatgagaatgtacagaacagggcgcttcaggacgaacttctgaccattccgggcgtcatgatcacagatacgcctgtcagatattatcccctgggcgaaaaggctgcccatctggtgggttatgtacagaatgtaacggcagaggatcttgaggagcacaagggagaaggatacctgtcggacagcgtcatcggcaggagcggcatggaaggtctgtttgagaaggagctaaagggacagaatggccgcattatatccattgttacatcccagggagaagaaaagcaggttttggcagccattcccagaattgacggtcaggatatcaccctcaccatagacagcagcctgcaggagttggtgtatgatgcattccgggacagtaaaagctgcaccgtggccatgaatccctacacaggagaggttcttgctctggtgaacacgcccagctatgataacaatgactttatcctgggcatgtcggaggaaacctgggccggactgaatgaggatgagagaaagcctatgttaaaccgtttcaggcagcgctttgccccaggctcctcctttaagcccatcacaggcattatcggccttaccgcaggcgtccttacgccggatgagaattttggggaggacgcagcaggactaagctggcagaaggatgccggctggggcggctatcacgttaccacccttcatggttacagtccggtcaaccttaaaaatgcctatatctactcggataacatatattttgctaaagcagccctgaaaatcggatatgatgatttcatggcaggactggaccggctgggctttaaccagaagcttccctttgaaatctcggtggctgaatcccagtactccaatgctgaccggattgaaacggaaatccagctggcggacagcggatacggtcagggccaggtgctggtgaatcccatccatctggcatccctttataccatgttccccaatcagggaaaggttctgaaaccctatcttatatacaaggatacaccggtgccggagatctggattgaggacgcctgtacacaggaaacagcagagaccgtggaggacgcaatgaaggctgtaatcagttcggaacacggcacaggacatgcagccatgcgttcagacattactctggcaggaaagacaggaacggctgagataaaagcatccaaggaagatacaagcggcacggaactgggatggtttgccgtttacacggcggataaggacatacagaagccggttcttatggtcagcatggtggaagatgtgaagaatgccggaggaagcggcctggtggtcagaaaatccagggatgtgctgggagcctatataccgtcaggccagtaggacaatccgaagatacagacatatactattatggaggagggaatcagcataaactgtatatgggggattggaggggaaatcaatgcctatggattcattttcatcagaagggattttgcggaggcttatcaggcttccctatctcccgctgtatgtgggagtattgaacgcggcggtagagctggacgttttttcggaccttacccagcgtaagagcatcagggagctttcagaggagagagggtggaatgaagataacacgcggtatttcctggacgccctttactgtcttggatttatttggaaaagggatggaatgtactgcaactgcagggaaacggaccgttatcttgtaaaaggcagaccggaatacatcggaggacatctggcttttcactgcgcagaggattgtatgggatgcagggatattaagaggctggttgaagaggggcccggcggagacagccaaccggaggggcagctggcctttgagcagtacgtacagaacatgcgggattcccaactgggcttccgccagaccgagatacagaaaatggtaaaggaacttccggaatatccggaaatccggaagattttggatttaggctgtgcaacgggactgctgggccttggcgtgattggagaacgggaggatgtgtacgggatcctctatgaccggccagctatggaaccggcaatccgggagtccatccgtctgtcaggcctggaagagagagcggtacctatgacaggagattatctgacggatgatataggaagtggctatgacctggttttggccattgccaccttaagctttgttgaacaggagatggccggcctgatgaagaaactttacaaggccatgaatccgggcggcgtgctgctttgctattcagagggaatcgagcgggatggctccggaccatgggacatgatgctgggctggcttccgtataatatgcagggatataaccttggagtgaagaagaatgaaataacagaggctgccatggcagccggcttcaggagtgctgagaaacggaccgggatctattccacaggcaacgtggatgtggatatattcagaaaataacattataagagccagttatgaaaataagctggatacgaaaaaacagagaggctgccggactttgcgggtacagcctctctgcctttgtgtgagctctcagcccagccagcgaaacatgatggtctccagctgtcggatatcaatgggctttgccatatgctggttcataccggcttccagagccagcttaatgtcttcggtaaacgcatttgcagtcatagccacgatggggatggaggctgcgtccgaacgttccatggcacgaatcctccgggtggcctggtaaccgtccatgtggggcatctgtatatccatgaagataaggtcatagtatcctgtaaaggaggccgcgaacatttcaactgcctcccggccatccatggctgtctctacatgggccccggtgttctgcaggaaagccatggctatttcctggttcaggggattgtcttccgccagcagaatccgcttgcgggaaaaatcagcgttgggaagcccgggaagggaggctgcagcggtttcttcctcctcatggagggcaaagcgccgcagcatgcatatgagcttggagggaaacaggggcttggaaatgaatccgttggctccggcttcttttgcggcggcctcgtattcagcagtgtcataggctgagataacgataatgggaacgtgacagcctgcctgggcacggatttgtctggtcacctcgatgccgtccatgtcaggcatacgcaaatccacgatgacagcaaaaaatccttttaggtcacggtgggcggaaaccactctggagacagcctccctgccggatgtcacaaaggagctgttcatgccaatctggttcagacaccggcatgtctcctcgcatacgattctgtcatcatccgccacaaggaccgggagctcggtaaggaccgaggaatctggcagaatctggtttctcagtctcaggttaaaggtaactgtaaaacgggaaccacggccgggcgtactctctacccaaatgtcgccgtccatcatcctggctatgttgcgggtgatagccatacccaggccggttccctgaacactccggattcgttcatcctcagctctttcaaaaggctcaaagacgcgctctatgaattcaggcgatattcccaccccgttgtcctcacataccagccggtaggtgctgtaaccctgctgcggactgcgtgtttctgacagctccagcgtaatggtcccgccgtggggcgtgtatttgatggcattggacagaagattattgatgatttgctgaagccgctgcatatcaccgcacacagcctcgtgttccagtgtttcaatatggatattgagagtgtggcctctgcgctttaagtctggctgtatcatggagataacatccttaaagagggaatccagaagaaagtcctcctcagacaggacgatacgcccgctttctatctttgacatgtccagaacctcattaatcagtgagagaagaagcttggaggaactggtgatttttcctagacaatctatcacccggtccggatcatcggcgcaggaggcagcgatggctgtcagcccgatgatggcgttcatgggggtgcggatatcatggctcattctggacagaaaggtgcttttggcctggttggccacctgggcagcgttgagggcatcctgcaaaagctccttctggcgtttttcctccctgatttccgtgatgtcggagcgggtcagaaggatgatcttccgctgacggttgtagtaactgtagcgcagctttttatccctgaggataccattctggatggttcgggagtaaaggatgtattctttgttttgttccagctcctttattacattgtcaaggctcataagacgggtagtttcttcccattcgtccacaggaagataggcccggttatattccatgagctcgttttcgtaattgtctcccacctccgggggaagcaggttttctgaactgtgggaagacaggtaccggatatggtggtttgtatttgcatctatgtaagtcacataatcatagtcatcctgggccgccatctccaccagatgggacctcatttctgactcaatccggcgggcgaataaaagaagcctgtcactgctgcatccggaatggggacaggtacttaaataaatttcatgccactcgaacccatatggcgctccgataaagcggatttctatgcgtttgtgcttccggccgcttgcaaaaaagttgcgcagggattctgtacagaagaattcattccatatggcctggtccggaccatatacattatgctctgacagctccctcagcgtttgctccaaatcaagggtctgccctgtggtggaggggagggtacggtccctccagacatatacttcctcctcctttagacggagttcccagatggtatcaatgataccatctgttgcatcaatataatcatttagtgacagaccggtcgatttcatttttatattcctttcccgtttcatgcttacagcatactgtgcatttatgataataacagaaatatccggaaaacacaatgaaagtaacagcatcgtcagggattacttggcaagggttttcagatatggtacaatagacaaagctgtgtatcatttgaaaagagggaaattaatgttcacacaaagaaaaattttagttgtggaagacaatgagataaaccgtatgatgctgagcgccattctttcgtcggaatatgaggtgctggaagcggagaacggacaggctgccctggcggttctgagaaaatacagggatggaatcgcgttgattcttctggatatcattatgcctgtgatggatgggtataccttccttgcccgtatgcaggaggatccggcgctggcatccataccggtcatcgtaaccacgcagagtgatgatgaatccgatgaagtgactgctctttcccacggggccacagactttgtggcaaagccttataaaccccaggttattttgcaccgtgttgccaatatcatcaagctcagggaaaccgccgccatgataaatctgatccagtatgaccggctgaccggactctactcaaaagaatttttttaccagcgtgtaaaggaaaccctggccgctcatcctgagcaggagtatgacattatatattccaacatagagaattttaaacttgtcaacgacatattcggagtgccttccggggacaggcttctggtcaatgtggccgccatgttttcaaagcaggttggcagatggggtatctgcggccggattaatgcggatcagtttgcctgtctttcggagcgccgccttgactactcagagcagctgtttgcggaggcgggcaatcagattaatgccatgtccaatgtgaaaaatatggtgatgaaatggggagtttaccatattgatgaccgctccatatctgtggaacagatgtgcgaccgcgcactgctggcggtccgcagcattaaggggcagttcattgtgtacctgcagccaaagtacaggctgaaggatagggaattgtcaggagcagaggctctggtaaggtggattcatccggaatgggggttccagtcgcccggggaattcattcctctgttcgagagaaatggattcatcacacagctggaccagtatgtgtgggaccgcacctgcgcttttttgcgtgactgggacagtaaggggtatccgcagatacctgtgtccgtgaatgtgtccagggctgatatctacaatgcggaccttgccaacatccttctgaggactgtacataaatataatctgccgccgtcgcgccttcatctggaaattacagagagtgcttatactgaaaacccgggacaaatcattgatacagtaacccacctcagggagctgggattcatcattgagatggatgattttggaagcggttactcctccttaaacatgctgaaccagatgcctctcgatatactgaagctggatatgaagtttatccagagcgagacagccaagccagtgaatcagggaatcctgcgtttcatcatgagccttgcgcggtggatgaacctgagcgtggtggcggaaggcgtggagacagatgaacagctggaacggctcagagaaatcggatgtgattacgtacagggctatttttttgggaagcctatgcctgaggatgtctttgaggagctgatgaaaaagacggaccgggaaaagaccggggggagggaaccggcaaattataataacataaaggagaaacaaacaaatgaaaccgaatgaagctgcagaaaaacaggaaatcatgtaccgtcttaaaaatgcaggggagctatatgttctgctttccatgtgtacaggagaaccctatgtggtctgcgaccaggaaacatatgatgatgagatcatagttttctttgactcccaggcagctgtagaggaggcaaaagaacagacagaagcgggaacgcctgtcaggcccatgaagctggagaataagcagtttttaatcttttacaccagcctttacacccttggggttaatgctctgctggtgaaagacggcgggaggaacagcctgattcagctgcaggactttgtgaagcgcaataagcagcagggacaggagacaggggagaaggtgtgggtggagaatccgtcccttcatctgacgatgctgtattatatgcaggaacttagaaaaaaaccgggacaggagaatcttccggaaataaaagagtggcaggatgagatttccaatggtttcagcaagggcagttttattgttcctgtggagaaggagggaaaggggctggctgctgtcaaagtcaacgaacagttattccaggctatctttacagatatattggaatttcagaaatttaacagggagggaaaactgcgtccccttgtggtaacagctgataaaatacctcaaatcatgacagaagaggcaaagggcgtgattctcaatcctatgggggtcagaatgccgctgcaaattaagagggcgcccagtcagccaaaaaaagatgcttaaggcatgagaaaaaaactctatataaaccgtgaagcgaaaataaaaaaggtaaatacagaaaggctgcgatgagatttaattcatcgcagcctcgttacgttctgagttcaagggacagttggtcgaaatcaccgggattatcttttggtttatcaagagaagttactttttttaatatttcgttttgtgttttgttatattcttccttggcccgtttgaggatagccgcttgaccttcccggtatgtgttctggaaccaataaatgagcagcgattcatctgaagtcagcagcttggtgacagatgcccctgcctcgtccgggcgcagcgctgcggcaagaggcgtttccaacggaatgtcgaaaatggaatggacggaagtgccaagtgcctttgcgatggattccatgtgaaccattttatccttttgattttctccgtttatgattctctttaaagtgctggcaggtatgtgtgtctcctttgataaggttgcctgggtcatgccctttaaattcataagtgcaatcagtttctcgtttctcacagtacgtccccgtttcctggtaatcccatatgatatatgtctctaaccccgtagtattgccataaaatacctcttatggataattctaccatataaatgaagattcttcaagaaacgacattgatttaaggatattttttctcatgatattttttctcgcaaatttttcggtctgttttaccttgcgaagttttttctcataatgttcagtgcggttatgatgtacgatttattcttacatagagggagctgttcctgtatgaatttttgttacatattctttcaatttctttaaatccatggacagcgccgcttaatttgtttacaatagacgggctggtcaaaggctggctgcatttaaaatacacaggagaccagaagctatgtctaaagataccaaaaaaaatataaaagggactgacaacagaaaaaatacaaacagtaaaattcctaaaaacttaaaaacacaggacaggcaaaatgcaatgaagcgaatcagtaagaccaggcaggcaaagatgcgggaggaggaagtaaagtccactctgaagtttggtgtgaaactggttttggttctggcagttgtgattggatgtgcacaactgtttttttatggaaagaatgtgatggcggacaggagcaatggtcccgctgcctggatagcggcagaaagcagtcaaacaaaggacaattcgtccgattcatccggtttatcaaaaacaggagaaccggagaaagaagaacaggaagagacagcaggtcctgaaacaaaagaaggcataacaggaggtctggcttccaaagaaatacaaacaggagaaccgccgtccggaatcgtcctggagccgtttctgcctgattctgaaaagggtcagcagcagacaccggagaccattgcacccttcgcggtctccagcgatggaccgggtaacgtggtgcaggcagcaccgcctttaggagaagcgtctttaggcccggcaggcggcggaaatgagctgttccctgtttccgggcctgcggacgcctccaagcccatgattgcatttacctttgatgacggtccttattacagtgtggacagcagaattctggacacgcttcaggcttacgggggcagggctaccttttttatagtaggaagccgcgttaatgactacaaggacactcttaagagaatccgggattccgggtccgagataggaaaccatacatttaaccacaagaatctggaaaaaatttctcccgaagaagtgacctcccagattgagatgaccaacgatgcggtggaggctgtaacaggtttccggccaaaactggtacgtgtgccttacggcgcctttaagggccaggtgccgggcctggtatcttaccccatgattcagtggaacatagatacacaggactggtccagtaaggataaggatgccattgcagcctctgtgctctcccaggcaagggatgggagcatcatactgatgcacgacctttattccgccacggctgaggcatttgagacggtcatcccccttctggctgcccagggctaccagtttgttacggtcagtgagatgtatgcggccaaaggagtgccgctggaggctggtcaggtctattttaatattcctaaggggtgatgattagaataccttattaacttccacaggaatcagcgcgcagatgaggattgtaaatcttttctgccggcagttaagctccgtggaaagtttttcttgacacgaacaccgtgtcgtgctttatacttaatttaggagaaaagtataaacactatggaacaaatgcagactgtcagcatggtatcaaaaaattaatcccggagacagcccggttttcaggggaagctgagtatggagtggggccggaagccaccggtatgattgagaaatttgtttacgaaacggaattgctgaaactaaaacccgatgccagagggatgggatttgattgttccagagcagatttaagagtggaagccggagcagctcccaccgcatatgaagcatgggtatcaatccctgaggatatggaagttaagccgcctctggttaaaaaaacgtttggcggcgggatgtatgctgcccatgtattgagggactggagttttcaggattggcgtttgcttcaggagtgggccagagaaagcgaaagatacgaagaggccggcggtccatgctttgaggaaatattaaattattacaaccttatgaataatggggcgaaaatggaagatacacagattgatctgctgctgcctgttaaggaaatgataaagtagaggacgcaggaaaaagtacaggcattctttgcttttagtccagagaacagtttatagcagcaggaggatttacatatggaacatttcaaatttgacttatatgcccgcgcatgtgatgcgtattttatttatggcgtaatcttagggtgagacaccgccatatttccattcctgccacataacggatgggattgattacggaggatgcagcagaaaaagcggctgccttgaacagcaggcagggctggatggggatattcgtctgactaatttgtatttaagaaagggaaaggataatggcaaagacttcatttaatgaatttctattggcagttgcgccggagcatcgtgtatttgtggagaagctgaatgacaaacttttgaaacaggggtgtgaacttgtaatcaaggaagtcaaaagcggatacactgccacataccagctggagaagaaaaccgtaatgaattgggtgtttcgcaagaccggtatctgggcacgcatttacggagataatgccggcaggtatgaggaggtcatcgccgctctgcctgcccacatgcaaaagaaaatggcggcttcccgtgattgcaagagacttattgaccctgatgcatgcagtgatacatgcgtgaaaggtttcgtctattctctgaatggagagacacaaaaaaaatgccgtaatgacggaatgctcttccttctgacagaggaaacagcagagtatattgccgggctgatctgtgctgaggctgctgcgcgtaagccggctttgcagcagctgaatcgttaagaacggcatatagattaatttactaattgtcaagtatacccctcctgctattggcttatcctaaaagcggttatcataatatcagttatcataatatcatgagttttctgcatagtattagaaaattttacaatatgatattttttcgcctgtatatatggtaaaacgaaagaacaatcaaagcttcggctttacaagcattacaagcccgcatatattgcgggcattggcgtattaacaagggtggaggggaattaacgagagcatcgcaggttgaacacactgtcacaggtggagcacgttttctgtttataggcaacagccatacatttaccaatgatttgccgggtacattttgcgaacctgcttggacaagagaaggctggtgaattgcagacagtggcctggagttatatgcagacacaggcgaaggctgaagaaacggaacgggctgacggcagttagacagagttttatcattatatttcaggaatgcgggacggattaaaaagatatgattaaagggataaccaattctaactaaaggtatagaggagcagttgatatgataacgatacgaaatgaagaagaacgtgattacaaggttgttgaagagattacaagaaaggcattttataatctatatatcccgggatgtgcggaacattatctggttcacatcatgcgcggacatgaggattttataccagagctggattttgtgattgaactggacggacaggtgattgggaatattatgtatacaaaagcccggctggttgatgaagccggaacagaaaaagaaatcctaacctttggtccggtcagtattgctcctgagtatcagagaagagggtacggaaggatgctgattgagcattcctttgaacaggccgttctgcttggctatgatgtggttgtcatactgggaagtccggtgaactatgtgggctgcggttttaaaagcagcaggaaattgaatatctgtatggaaaatgggaagtatccggctgcgatgatggtgaaggaactggtccccaatcaattggacggcagaaaatggttctattacgacagccctgttatggcaatctctgaggaagaagcacaggaatatgataataccttagaaaaaatggaaaagaaatatcagccgagccaggaagagttttatattatgagccatgcttttattgagtaagaaactaggtccgggctatcagtcacgaagtagtgaaccaaaggttatgccgtgaaaatgcatatggtaaaacgaaccgtggaagagtgacagcctgaagctttcgtatgaaaatatggattgctttataagggaagtaagggaagcaggggaaaataacaaaacaggaagactcatatcgcatgagtgcttataatgaaattaatcatatgaaatgaaactactgccgaatggtgttgcttaatactgtgaaatgccttataattaggcattgtggcataatgttttaacccgtgttatatagttggggtaaaaaatgtcgtaattaaaataaaggggcctgattttctttgaaaaaggggtgaaaaaggagcagaaaagagcaaaataaggacctgaactccggctcttttcgatttggaccggcccttgctacaagccaaaaatactgtgtaaacagcacaataaataaggaaaaaccatgagaaaactagctttaaatgatgagatattactaagcattcaacaacccgcccgctatatcggaggcgaggtaaatatggtgattaaggaccttgaaaaagtggatgtccgctttgccatgtgtttcccggacgtgtatgaaatcggtatgtcccacctgggcattcagattctgtattccatgttcaacagcagggaggacatctgctgcgagcgcgtttactccccgtggacagacttagaccccatactcagggagaagaagataccgctatttaccctggaaacccaggagccggtaaagaattttgattttctgggaatcactctccagtacgagatgtgctacaccaacgtgcttcagattctggacctttctcagattccgctccatacatgcgacagaacggagaatgaccccattgttatcggaggcgggccctgcgcatacaatccggaaccgctggctgacttttttgacctgttttatatcggagagggcgaaaccgtatattttgaactgatggaccgctacaaggagaataagaaggccggcggcaccagaaagcagtttctggaaatggcggcggagataccgggcatctatgtgcctgctttttatgatgtgacctataaggaagacggtaccattgaatgttttctgccgaataatgaacatgccatgccggtggttaccaaacaagtggtaacggacatggacagtgtgggatatattgaaaagccgttggtgccatttatcaaagtgacccaggacagggtggtgctggaaattcagcggggctgtatccgcgggtgccggttctgccaggccggggatgtgtacaggcctctcagagagcacagcctggaatatctgaagcactatgccagcgacatgttaaagagcacgggccatgaggagatatccctaagctccttaagctccagcgattacagccagttagagggcctggtcaatttcctcattgacgaattcaagggcaaaggcgtgaatatatccctgccttccctgcgcatcgacgcattttctctggacgtcatgagcaaggtgcaggatgtgaaaaagagcagccttacctttgcgccggaggcgggttcccagagacttcgtgacgtcatcaataaggggctgaccgaagaagtgatactgaagggagcaacagatgcctttgaatcaggctggaaccgggtaaagctgtattttatgctgggtctgcccacggagacagtggaggatatggagggaattgcgctgctttctgaaaagattgcggaagcctactatgatatccccaaggaccggagaaacggaaaggtacagattgtagccagctcctccttctttgtgccaaagccctttacaccgttccagtgggccaggatgtgtacaaaggaagaatttattgagagagccaatatcgtccggggcaagttccgcgagatgaaaaacttcaagagccttaaatataactggcatgaggcggagcttaccgtgctggagggcgtgctggccagaggcgaccgcagggtcggggccgtgatagaagaagcctaccgcacaggggccatctatgactcctggtctgaatattttaagaatgatgtatggatgaaggcctttgagacctgcggcgtggatatcggattttataccaccagggagagaagcctggatgaggtattcccatgggatttcattgatgctggcgtatcaaaggaattcctgatccgtgagtggaaccatgccgtgaaggaagaagtgacgcctaactgccgtcagagatgttcaggctgcggagccagggattttggctgcggcgtctgttatgaaaccgtaaaggaataggataaatgaaaattcggattaaattcagaaaatatggaacaatgaaattcatcggtcacctggacgtgatgcgttatttccagaaggccatacgcagggcggatgtggatgtatgttacagcggaggattctcccctcatcagatcatgtcatttgcggcccctctgggagtgggaaataccagcaacggggaatacgtggacatagaggtgtcctccaccaaagattcggaaaccatgaagaaatgtctgaacggggtgatgtcggaaggctttgaggtcgtaagctacagaggtctgccggatgacgcggccaatgccatgtccatagtcggggccggggattataccctggctttcagaccgggatacgagccagaggacatggataaggaaacgtggtttcaggggcttattgccttttttgagcgtcccagcgtcatggtgacaaagaaaaccaagcgcggtgaaaaggagatggatttaaagcccctggtttatgagctcagaatctgtcctgagggggatggcgaaatggaaggcccccgtctgtttatgaaaatatccgcaggcagcgctgccaatgtgaaaccggaacaggtactggatgcgtattacgggttcctgggaaaggagcggccgccctttgcctttatggtacagagggaagaagtatatgcggacagggcctctgatgctgagaaggaagccggtattcactcctttatctctctggaacagctgggtgaggaaatcagataatggacaaattagtagtgacccggcggggggataaggtctgtacggccgtggtatcagacggaaaggtaagccagctgatgctggagccggataccgccgactccctgctgggcaatatttatatcggcaaggtgcagaaggtggtaagcaatatcaatgccgcctttattgacataggaccgggatgtaccggatattacagcctgcaggaacggtggaagccggaacgtcttaagaccggcgacgagctggtggtgcaggtcagcaaagatgctgtgaaatcaaaggccccggtggtcacggaacgtctgtcctttacggggcggtactgtgtgctgactgtgggaaagaccggaatcggtttttccgcgaaaatacgtgatgcctcctacaaagccaggcttcgtgaacttctggaatgtgacctggcaggaactaaggacttgggcgttattgtccggaccaacgcagttacggtggaggaatgtgctgtgcgggaggaactggctgagctgatgcggacatggcaaaggctttcggcggaagctgggtgcagagtctgctacagctgcctttacagggcgctgccgggctatatagcggctatacgggattccttcggcgggaccctggaagaaattattacagatgttcctgagtaccacagggagctgaaggcatatctggaaatgtgccagaaggaagacgcgggacgcctgaccctttatgaggacagccttctgccccttggcaagctttacagcctggaaactgcttttgaaaaggcactgggtaagaatgtatggctgaagtccgggggatacctggtcatagagcccacagaagccatgacggttattgatgttaatacagggaagtactcaggcaggaaaaagatgcaggacaccatatacaagataaatatggaggctgcggatgagattggacggcagattaggctgcgcaacctttccggtatcatcattgtggattttattgatatggagagggaggaggacaggaaggcccttcttgcccatttagtagaagttgtttcgagagacccggtaaagaccacggtggtggatatgacggctttgaacctggtggagctcaccagaaagaaagtgagaaagccgctccacgaacaggtctgaatatgacaatacacaggggataaaggggaagaaatatgaaaatcataattgtaggctgcggtaaggtgggaaccacactggcagagcagctgaacagggaaaaccacgatattacactgattgactgcgacagcgaagcgctccaatctatttcagacagtacagatgtcatgagcgttaccggaaacggggccgtgtaccaggtgcagatggaggcgggaatcaaggaagcggatttgctgattgccaccaccaattcagatgagcttaacatgctctgttgtttgattgcaaagaaagcaggcaactgccataccattgcccgtatccgcaatcctgagtactcagcggaaatcaactatatcagggaagaactgaacctttcactggccattaatccggagctggctgccgccagggagattgccagactgcttcgttttcccaatgccattaagattgagctgtttgccaagggcagaattgagctccttaaattcatgattcccaaggattccattctggaccgcatgaaggtaatggacgtggtgagccggttaaagagcaatgtgctgatctgcgccgtggagcgcggggatgatgtggtgataccggacggcaactttgagatgagaggcggagataagatatcctttattgcgccccatgcagactgtgctgatttcttccgcaaagcgggtatcgagaacaacacggttaattccgccatgtttgtgggcggaggaaagctgaccgtgtatctggccaaggccctggctgataccaagataaaaattaagattattgagcaggacgaggagcggtgcaggatcttaagtgagcttcttcctcatgcaatgattatacacggggatggttcggaccagaagctgctgctggaagaaggtatccgtcagacggaagcatttgcctcccttacggggtttgatgaggaaaatatactgctgtccttatatgcggccagccagtccagggccaagctgatcaccaaggttaataaaatagcctttgaaaatgtaatcaacgccctgaacctgggaagcgtcatataccccaagatgctgacagccgacatcatcctgcagtatgtaagggccatgcagaactccatgggcagcaacatagagactctgtataaaatcgtggccgacaaggccgaagcgctggagttcagggtaaggggagattcgcctgtgctggggattccgctggagaagctgaggaccaggaataatctgttggtggcatgcatcaaccgcaacggccgcattatcatgccccgaggcaaggataccctggaggcaggggacacagtcatcattgtgaccacccatacagggcttaatgatttgaaggatatcttaatgtaaaggcgggcgggacgacatgaatcgaagtataatcatttatatgctgggctggatcatgaatatggaagccattttcatgacactgccagttgttacagctgttgtctacagggaaagcattggctttatttatctgggcgttgcggctgtctgcggtctgctgggatttatgtgcaccaggaagaagccatgcacaaagatgttttttgccagggaaggatttgtgacggtttccctggggtggattgtattgagctttttcgggtgcatgccctttgtcataagcggggagattccccatatcattgacgccatgtttgaaatcgtatcaggttttaccactacagggtccagtattattcccaaggtagaggatatgtcacatgccaccctgatgtggagaagcttttcccactggattggcggcatgggaattctggtgttcatcctggcgattctgcccatggcaggggattataacatgcatattatgagggccgagagtccgggcccttccgtgggaaagctggtgcctaaaatccgtattaccgccaaactgctgtactccatatatttttgcatgaccattgtcatgatgatccttttgctgcttggaaaaatgcccttatttgacagcatatgcatgagcttcggggctgccggcacaggaggctttgcctgccgtaattcagggcaggcggattacacggtgtaccagcaggctgtcatcactatttttatgctgctctttggcgtgaacttcaatgtgtactacctgctgctcatacgcaggcccaaggatgcggggcggtgtgaggagctgaggggatatctggctgtggtggccattgccatcctgctcatcaccatcaatatcaggagcctgttcccgtccctgtttatggcattccaccaggcggcgttccaggtttcctccattatcaccacaacgggatactccaccattgattacaacagctggccggagttttccaaaacaatcctgctgctcatcatgtttatcggcgcctgtgccggcagtacgggcggaggcatgaaggtatcccgtgtcatgattgcgtttaaggaaataaaaaaggagatggcatcggttatccacccccgcagcgtaaaggtgctgaagtttgagggaaagcctctggagcataataccctcaggtcccttaacgcttatattattgtgtatttcatgatattcggcatatccaccctgattgtgagtctggacaattatgattttatgacatccttctccgcagtggccgccaacttaaacaacattggtccaggaatgtctgtggtgggtccggcatccaactattccatgatgtcctatctgtccaagaccgtgctcatatttgatatgctggccggaaggctggagctgttccccatgctggttcttctgtctccgggaacctggaaacgcagttgagatttgtgaaaaacaagtgaaaaaacagtgacttttattgacgaatccggaccggcggggtatgatttccataagaaatttatgatggtacgcctttggcgtgtatggaaatcaccgtgaaggaggagacggattggtaagatgtacaaagggtttaaaaggcataaagggcgccggcgccctgattctggcgttctccctgacgtttgcgtatccggctgtatcatgggccgttgagacggaggcttcggaaggcacagtcacctatggaccgggaagctatgtcgttggcgaggatattttgccgggagaatatgcggtttttacggaggacacatcggaacagaacgcctattccacctgtaccattactttatataaggatggtacggatgagcggcgcattggaaccttccagtttcagcaccacggactgattaccctttacaaaggacagcatctggtaatcacaaaagggtacgcggtggaggcggaccgggcgggcattaccctgggaaccaccggtatgtacaaggctggccgggatatggaaccgggcacataccgcattacgccccttacctttggcagcgggtattacgccctttataacgacgtgagatattattatgattatatagatgaatacgccgcgctgtttgagccggtcacggtcaacatcgcagaggggcagtatctggagctttttgatgccgggtcaatcgagcgggtgtctgactgaatgaggcccgtaaaagtgacaaaaaaatgacaaaaaaatatggaaattccggttgacatcggaaaaggaaaatgctatgatataccagtatgccgcacagcggggttgtaagagtctgccagtattccacggaagaaagcaggtcaccgaagctggcgagtaatgataataggaggtgcctttcatgtacgcgattatagcaacaggcggaaagcagtacaaggtagcagaaggcgatgtcattaaggtagagagactgggcgcaggcgcaggcgagaccgtaacatttgaccaggtgctggttgtaaataacggcgagctgcagattggatgcccaaccgtttccggcgcaactgttacagcaacagttgagaaggaaggtaaggctaaaaaagtgatcgtttacaagtataagagaaaaactggctatcacaagaagaacggccatagacagctctatacccaggtgaagattgaaaaaatcaacgcttaattgtaaatgatatgattaaagcaaccgtattcaagaattccacagattcaggcaatgctgtttacacagggattgtgatggagggacatgccggttatgccgatgagggtgaggatatcatctgtgcggcggtttcggctctggctcttaactttttcaattcagtggaggcatttacggaagatggatttgaaggcggggcgggagagagcggttcgtttgaattccgtttcacttcagatataagtcctgaatcaaaactcctgatgaactctcttattctgggacttcagaatattgagagggattatgggaaatcatatattaacgtgaagtttaaggaggtgtaacacatgttaaagatgaaccttcagttattcgctcataagaaaggtgttggttctaccaagaacggtagagactccgaggccaagagacttggcgctaagagagccgacggacagttcgtactggctggcaacattctgtacagacagcgcggaacccacattcatcctggcaacaacgtaggcaggggtggcgatgataccttatttgctttagtagacggagttgttaagtttgaaagaaagggcagagacagaaagcaggtttctgtatacccaagggcaatcaacgaataatttcgaagggctccatacttagcgtatggggctctttttcacaccacaggaggtactgtgtatgtttgccgatagcgcaaaaatatttattaaatccggtaagggcggagacggccatgtgtccttcagacgcgagctgtatgttcccaacggcggtcctgacggaggtgacggcggccgtggaggcgatgtcattttccaggtagacaaaggaaaaaataccctggtagatttcaggcatgtgcgtaagtatattgcaaaggatggccaggagggcggaaagaaacgctgccatggagcggatgccgatgacctgattgtgaaggtgcctgagggaaccgtgcttaaagatttcgagacgggtaaggtcattgccgacatgtcaggtgacaaccagagggaagtcatcttaaggggcggcaggggcggtcttggaaatatgcactttgcaacatcgaccatgcaggtgcccaagtacgcgcagcccgggcagcccggtgccgagctgtgggtgcagttggagcttaaggtcattgcggacgtgggcctggtgggctttcctaatgtgggaaaatccacgctgctgtctgttgtcagcaacgcaaagccggagatagccaattaccattttaccaccctgaatccccatttgggcgtggtggacctgggagacggagccggatttgtcatggctgatattccgggcctgattgaaggcgcctctgaaggcatcggcctgggacatgcgttcttaaagcatattgagcgcaccaaggtcctggtccatgtggtggacggcgcttccgtggagggcagggatcctctggaggacataaggaccattaaccgggagctggaagcctataatccggagctgttaaagcgtccccaggtgattgccgccaacaagatggatgcggtgtatgcagaagaagacactgagattatacttgacgagctgagaaacgaattcgagccaaagggaatcagggtgttccccatatccgctgtcagcagacagggagtgaaggagcttctgtaccatatcaatgacctgcttaaaacagtggatgatgcgcctgttgtgtttgagaaggaattcgaggtccagtaccagggcgacagaaacctgccttatacggttaccagggcagatgacggagcttatgtggtggaaggtcccagaatcgacaagatgcttggatacaccaatctggattctgagaagggatttgatttcttccagaagttccttaagaatacgggagttctggacgacctggagaaggccggcatagaggaaggcgatacggtccgtatgtatgggctggagtttgattattacaaatagaaggagttattatgacaagcaagcagagagcctatttaaaaggcctggctatgaacatcgatcctgtgttccagattggtaaatccagccttacgcctgagattacccaggccgtggacgaggcactggaagcaagggaactgattaaggtgacagtgctgaaaaattgtctggacgacggcggttccatcgcggatgtccttgcagagcgcacacactcacaggtggtacaggtcattggcaggaaaatcgttctttaccgtcctgccaaagaggaaaagaaacgtaagattgtgctgccggagaaatagacaggcaggtatccggtaaaggtatgtgaagaagggatttgtttggcaaaaataggaatattgggcggcacctttgaccccatccacaatggtcatctgcggctgggcagggaagcttatgagcagtttggactggatgcagtctggttcatgcccacaggaaatccgccccataaaaaagatcataaaatcactgagggagagatgcgtgagcgtatggttaaactggccattgcagatactccctatttcctgtattcggattttgaactaaggcgtaagggtaatacctacaccgcccagaccctgtccctgctgcgtgaggaatatagggaggacgtgttctatttcatcataggagcagattccctgtatcagatcgaacagtggttccacccggagctggtcatgaagctggcagtgcttctggtggccgggcgtgcctatcatgatgaccaccagccctttgacaggcagattgaatacctgactgccaggtatggggcaaagatttaccccatccgctgccgtgagatggatgtgtcctcggaggaaataagggcatccgtgtctgacggacattccatccatggatttgtgccggatgcagtggaagaatatattaaggaccatggactgtacggtggcggcgtcaagaccccggtcctggccggcaaaggagaatgaatgtatggaaaaccaatgcagccagattatgttatacaggaaaagccttaagagaaagctggcgcccatgcgctacgagcattctctcagtgtgtcatacacctgcatgaacctggccatgcgttacggctgcagcctggacaaggcagagctggccggactgatgcatgactgcgggaagcggtattcggatgatatcatattgaagaaatgcctgaaacatggtctggaagtgacggacgcggagtacaaggccctgcctgtgctccatgcaaaatacggggcatggctggcggagcacaagtaccagattacggaccgggaaatactggatgccatcggctgccacaccacaggcaggccggagatgacgactctggataaaatcctctatatagcggattatatagaacccaggcgctacaaggccgataatctgccaatgataaggcggatggcgtatgaggatctggatgagaccatgtatgccatattggcgggaactttagattacctggaaaaaaagggcggaagtattgacccgatgacagcccaggcatatgaatattttaagaaagtgaagggagaacgcgatgaactcaaaggaaatggtgaaactggcatatcaggctctcagcgataaaaagggagaggacattaaaattattgacatccagtccgtatcagttctggcagattattttataatcgctgacggcagcaaccccaatcaggtgcaggccatggctgataatgtggaggaaattctggaaaaggcaggctgcgagtgcaagcagattgaaggctaccagaacgcaaactggattctgatggattacaaggatgtgatagtccatatcttctgcagggaagacagattgttctatgatttggagcgaatctggagagatggaaagacatttgtggatgtaaatgagctgtaatgtgtaagagttggaaatgaatgaaaatgaattaaatccaatgagggacggatatatgaggtctggaatgataagaccttcgtatatccgttttttattggagttctttcatccgggtttcactttaaatgataattggatggtgtaagtatgtaacgctttcattgacaattacttatagcaatgtctttctgtacatgttattataataataaaaaagagcggaatactgagtgattaacagcagggtttttacggaggaggatggacggatggagaaagtgttggaattacatcaaattatttacggtttattcgcagcacaaattgaatttggcacctacggatataaggacccgctgcctaaaatggaagatgtcagtcactggttttctgtttctctggatacagtgaaaactgcttaccatcagttaaaagtagagggatatattactttgactaaaaaagcgggggccgccgtggccatacagtttcagaggacagagctggaaagaaatatcgagacttttttttctctgcgtaaggatgcagtaatggatttgtgccaatcttttggcccgctgttcagccgcgcccagtggtacggcctgaaaagcgcggggcctgagcagctaaacgaattagagcgtctttgctcacagccgaaaatacttagaccatatgttatggttcagcacattcggctaatctatggatcactcaacaatgacctgctgttacggcttatatggcaggcattccttttttaccaagctccatttttaagcctgccggcagatttggtggctttcgaggacagcgacgatcccttgctcgatatgattagtctttgtcgccaaaaggattggaaagggctttgggaaactgtggcatcctgccaggaacagattacgtccgcaatcaattggttttatgcggaccgcattaccatggagccgcctggggaacctgtgtccttccattggagcgcctatcagagtacgtctcagtgttgctattccttagcgatagatttactcaaaggaatacgcctgggctattttgcacaggatggatatttgccatcccctgcaaaaatcgcgaagtatgagcgggtatctaccataactgtccgccgtaccctgacactgctcaatcagctgggcgccacccggtctgtcaatggggttggaacctatgttctaagtatggaggatagtacgaaggactgcgatttttctcagcctgtaattagaaaacgacttctggactttgtacagagcttgcagattctggctatgacatgcggatcgtgtgctaagagtgtcggtataaaccattccgctgttgaactgtggaaagaacggttggcatatataaaagataattttcggtatgaatcggtagtatatgcttctcttgaaataatttccctatttgcccccaatcagacaatcaggaaaatatatgatcaattacttcgtgttctgctttggggctatcctctgcgcagtatgcacggttccagggagaaaatcaatgaattttattttccttatgtcaacgttctgctggatagcttagaacgctgcgattgggacagattggctgcagagttggaggacctgttattttatgaactcgattttgcagcattccgcctgaatgaactggatattagagaagcaaccagtcttgtgattgtaaggcatggagcgtaagtgtccataaaagagaagattaagcagctcttctccatatagagcgctgaaaccttttaggtttcggcgctcttttttgaacaaggaatgacttgctatttttttaatcgcatgttaaactaaaacaaataaagatgtttgtgataaaggtgggaacatgaaattaagaaagacctgttttcaagggtctgctttgtaacgtcatttcaaaggggcaacaattgacaagccggcacagatatagtgtgccggctaaaaatagtttctaacagttatttgtactgagcatagatatattggtctgtttcattggtccatataactccgctaatccggtttcctaactttgagggattatacaagttctgctcttgccaatgagagaacttttttccttccaggtgaggtgctctgtccgccttgggtagggtattgagtgtattctttaagctgacaacgccttttctggcatttttaggtacttcgaattctgcaaatacatcacctggatcgtccgggctggagccggtcatgaaatataaagtaacggtattgctttcagcctcagcgggagcagtctcttccggggcagtctcagcgggagcagtctcttcggggacagtctcagcgggagcagtctcttcggggacagtctcagcgggagcggtctcttcggggacagtctcagcgggagcagtctcttccggggcagtctcagcgggagcggtctcatccggaacggtctcagcaggaacggtttctgattcgccttcatttagcagggtttcaatcacacagtctactttagtcagagagaatcggttattggccgcgtagcggatctggttgttgccgtccagaataatagtcacgggcacaacatttgacgtggtactcaaattcagttcagaataatcgacatattcccacatggaagtctgatttggataagatgtgggactgaagaaaatcttgtcactgacctggctgagaccatatcctgcaatcatgtttttgatatcattcttagaggatttgattgtgtcgatgaactcaatttccacattttcatggttcaagtaatcactgtttgtcattgactggattgcgttgacactgggagaacagttgtgagagaagaacagcagtactttggcctttgtggtatccttaaggatataattggccccccaatcttcaccggtgtaaggctggaattcattttcatgccagtggtttccgtaagaaatggtctgacatgtctgtgctgaaactggaacggccgcagaaatgcataatagtccggtggtcagaatgacggttgcccattttttttgtcgctttttcatattacctcctaagatatagtgtagttttgttacaaaataattatattactgcaggcgttacggatgtgggataaaagtgtgatgaaaaggatgtgaaagtgttgcagaagagtgaaaaataaaaataattacttttaaggcatgaagaaacgattgacatcatggaaaaaaagtgtatatagtaaggactattagattaaaatgataaaattttttagcggagggacggtaagagatgtcatatatttcagtttatagaattgagctagacaaagacattatggtgctcttgtccggcagggagatacgcagcgatgcagatatgccgtattcccgatggtatgaagagcagctttctcggtgtaaatacgttggcatggatgagagggactgttcgcccgcgaatcttaaaaatgttattacacaagggaaagatattttcattcgggatcgtaatgaaattaatggacgttggattgaaatggaattgacgggcagtccagatgaaagggctgtgattttggttgtaaaggatattcatgacaatatagtaatggaacgaaaaagacggcgcatggaggtatatcatttttacagaaacagagttaaacagatgcgggacaagggtttttattgcggactgctggtattagacatggacagaggcggagaggtctgttttgctgaaaagaacataaggcagtatctgactgataatgagaatagtgaaacatttaccagactgcgtaaatatattacacgcccttcttttgaggtaaagacagaaaacgattggaatgatgggggggaatgccagaatgttaatttgggtaaccgtggagaagagcgctggattcaactatatgggagtatgattacgacggagagcggacggcatttcaaatatctgatgtacatgggaatgagaactgggataaacaatatattgaatggggaggaaaaaggggatacacagctggtagagcgttcggaaggatatatgtttgaatggaatatccgggataacattcttatattaggtgataattgggacagcaaattccgtataaatacccagggaatacatgataagggattaaagcaaatggaggaatatatctggcgggatgattgcccgcgtctgcgcaggttctttgactctgccttatacggagaaaaacaggataacatgctgattcgttttagaacatatcaatcagggaacagctatgcatggtgcagtctgaatctgctcagcgtgttgtgcgataaagagatgccggtctatgtggtggggattgtcaaggatatcagtcaaaagttaaaatatctttctgagaaggctctggaagattatggcggttcagttgggaataaggtggtggctgcaagggattatgtggatgggattttgtgtgaaaaaaaaccggaaagtgtacatgccctgcttctgattggaatggagaaaatcattcctgaggaggatccggtgggacttgacatactgacataccagttcatcgagatactgacgaagatgatgtatccacgggacagagtctggatagaggacggaaagctgctgctgtttctcaatcagattggaagcagggaaaatgccagaaataagtccaaccgtatcgcaaaagttattgaacggatgactggctacaacatggctacggacataggcatggctctttatccggaggatggaggtacatatgaattactgtttaaagttgtcagaaatgagctgtggagcgggacacgagtagatcgcgggatgaatgagatggaggagcaaagcctatctggagatgatgggcattctctgtctgtggttgctgacatagtcgatgagtggtaccgtatgattcgggtcaacaacctgttagagaagaagatgaggatgacgcaggcccagctgatgctgagccagattaagccgcattttatttacaatgtcctggctaatattaaatccttaattcataatgatcccaatcgggcggaaacagtccttgtggcattcacaagatttctgcgggtacagttggatgccattggtaaggatgagatggctctgttttcagaaaatctgagctttgtttccaattatcttgaaattgaggccagccgtttcccaggaaaatttgagacctgctatgacattcaatatcaggacttttacatgccccattttatattgcagccgctggttgagaatgccattaaacatggcatatgcaaacgcagtgatacaggacatataaccatacgttcgcggttggaaagggatgagattatcgtggaagtggaagatgacggtgttggctttgatatgtcatactccccgaagaataagattgtttgcgggggggataggtggggcagcgggggcgttgggttagaaaatgtacgtgcgcgtatatcgtatttgacccatggctgtctccggattaccagtgtaccgggaaagggtactgtggcttctgtgattatgcccaaaacagttgaagctaaaggagtaaatgatgagtattagtgtaattgcggtagatgatgaaatcaatattttggaggatttgaagcggattttagaaatgatgaagggggtacggctggttggagcttttatctcaccacttgaggcactgaaatttgctcaccgaaaccatattgacgcggctgtactggatattaatatgccggaattaaatgggatagagctggctgagatgtttaaggatatcagcccggatatgcaggtgatttttgccacaggctatgacgaatatgcgctggcagcccaccatctggatgccatgggatatcttctgaagccatatacctatgatgaggtttccagagcaatggaccgggtggggcttctggtagaaggtttgagggggcgtcacatggataaggatatcgaggttcgctgctttgggaaatttgatattataaaagatggacagcctatattttttaagtacaataaagccaaagagctgtttgcggtgctggtggatgctaggggagggatggtttccatggaatatgcaatcaccctgttatgggaggacagggaatatgacagcagggtgaaaggactgtatagaaaggcggtatcaatgatgcgcgccgctttcagggacgctggatgcgaggacctgtgcctgtattacaggagcagcctggcagctaatataagagcattctattgcgattattatgagtatatgaaaggggatgccgaaatgcggcgcagtttttttgataattatatgacggactatagctgggcggaggagaccaacgccatgctgcataatatgcgctgacaaaaatacttactaaattataaagaacggtggatgcattccaccgttttttgttgaataaagtctgtaagactgaaaggaaaaataaagaaaaaattaatatttataaaataatgatggatttttcacactttcgtaacactatggtgcgatatatgtgacacagcgagtgctattatgtagacacattacagaaaggaatcagataaaatgtcactgatagatttaatccctgtcattttagcaggaagcgccggtttggcggcaggcggtcttgttccaacatctggggaaaagctgatggcatacaaagtgaaaaagcaaatgaagaaattcgtggtttatggatattgcggttggacgcaatggctgtatcctgtgggggtaggtgcatcgtggatggctgcggcattggaagcgtctgttctaaaagcgttatttttcatgataatttcttatgtgatgtttattgttacctatctggacaaccggtatcggattataccgaatgaaattacctttgcagtactgttgtccggtcttggatatggcttagcggcaaaagggctgtctggccttggcggtgcggcggcaggggcaacagcaggattcatcatttgtcttttagcagcagctttgactaagggaaaaaatgcagttggggcgggtgacgtaaagatgctggccgcatgctgctgcctgggaggtgtgcctggattcatggatgtgcttttgtacatggcggccgccctgggagtatactgcgtgggcgggctgttgcttaaacggctgaagctgaatagtttttttcctatgggaggttttattgcaatggggttggtactgtctttgtatccgcggcaggtggagatgggggtaacgatttttaacagactgctggtggggggatgaagaaatgatagggaatatgaagtggaaaaagactgcggccaggtggtttgcaggggaagaatccggccaggggctggtggaatacgcgttgatattgctgctgattgctgtggcggtatcggctgggctgcgtggaatagggccggcggtagccggggattttgacagggcaagggatgcgcttaactaggtatggctgaacggcagttgagagaaagccgggatttcatatttcggtttatctatagataacaaatgacaaaaagacggaggaaaagaaaatggattttgcagagatgaagaattggatgctggaggaagagagcggccagggtatggtggaatacggattgattattgtgttgattgccatcgctgttattacggctcttaagggcatagcaactgcactcgatactaagttccaggaagtatcagacacattacaataacctggtcccataattttgtaatactataacatggctacatatgcataaacaaagcagagacgttgcaggtgggaaattggtcctctgtagtgtctctgctttaatgagagggactaactgacgatgaagcacaggaaattgattgcctttttggctgccatcatagccaccttcgccatatggcagatcttgaatacacagaataaaaacaaggaagcgcagatggattaccgtgaggtgattgtggctgccggcgaaataaaaaaaggtgaagtgataccaagaagtaagctgacattgaaaaaaataccaaggcagtatactcctgaggatgcgctggaggatggtaatagtgcaattggcaaaatggctcaaagtggtattttgccaggagaaatcctgacgacagctcgtctgatggacaccgagaacggccaggctggtcttgcttataagataccagagggaagcagagccattactttgaacgtggatactgagactggcgtatccggcatggtgatgccgggggatgaggtggatttaatcgtcagtctgacgggggcaggcagggtggaaaatgtgcatccggatggcgcgccgcctggaggagacggcttggatgaacaggcggaagcgctggtgtcgggaggggccagtgtaaataccggttatctgatggaaaaggtccgggtgctggcctgcgggagcgaactcagcagggaagctgccggacaaatagaatcagagaccggcaagatgtatgatagtgtaacactctctgtaaccagggaagaggcgcttcaaattgaattctatacctatctttcaaaaaattataatggaaatatcaggatgactctacacccggcggataagcaggcagagtcttccgtgaatgataccagggagtaaaaacaatggagattagagcgattatagcaggcagtggaatggaagaagagacccggctggaatatctgctggaggatacagaaattcatatctgcggacggattaccgatgtatccaggggaatagatacattggatcgtgaaaagcccggactactcattataactggtgcctatgaccgaaagatgcagatgttctgtcagcaggtatatatactgtatcccatgtgcgctatggttcttctggcagcggaggcggataaggcactatatgggcaggctatggagagcggaattcgccgggtcattacatcgagtcctgaccggcttgctcttgtggggatgttaaaagagtcctatatcaatgaaaagacgcatcgggaacacataaccggagaggagggcggacgtcctaagacggaggttatccttgtgactggggcaaagggcggaatcggtaagactgccttggcagtaaaccttgcggccagactggctatatccaagcgcaaggtaattcttctggattgtaatctgcagtatggcgacacgggtgtttttcttggaatggaacccaaggaaaccatggcagagcttttacaggaacagagaactcccacccttgacacgcttaatgcttatcttgcatttcaccagtcaggccttcgtgtgctgtttggacctaaaagtccggaatacgcggatgttattggcggaaaaaatattgacaagatcatttctattctgcgtaattattatgactacgttataattgacacggctgtcggattttccgaggttaatctggcgcttttagatctgtgcagccatattctgtttgtgtcccaatctgatttatgcacattgagaaatacgaaaaaggcgtttttgcttctacggtccctgaatatggagcagaaattaaaagtagccattatggaacagccggcaaagaacaacggggtcggcatggcagatgtggaacgggtgctgggacacaaggtggatctcactgtttccagggacgataagacgatgaccgcatgcctgaatcagggaaggcccgtggtgctggctgcgggcaaaagtaagctggccgccgactatattgccgtagccgaattggttgaacgggggttcggtgcggacaagtcccagaaactgaaagttcccttattgtcgaaaaaggataagagaaagttgaggtagcatagcatgggccttatggaacgtttggaacgggcaaagatggcgaaagtggccagcgagaaggatgtaagcctggaagagctggaatactacgatgaatatgaatcctttaaggagagcatacacgcggagctggtgaagacggcagcatcagaggaaggcctgggtcttcaggaggtaatctccaggctggtggaggagaaaggggaagaaattcctaaaccaactcagaagcggctgatccagcagattgtggatgaggcagctggtcttggaccattggagcgtctcctcaaggatgatacgatatcggaggtcatggtcaacgggccttacagtatctatgtggaacgcagcggtaaactggacctgacggagattaaactgcgggatgataagcatgtgctggatttaatcaatcggattgttaccccgattggacggcgctgtgatgaggccagccccatggtggatgccaggctaaaggatggttcccgtgtgaacgcaatcatccctcctttggcgctgagcgggcccaccatcaccatacgtaaattctccaaggtgccgctgcgggctgagaacctgattgattttgggtccgcttcttttggtatgctgggttttttggatgcctgtgtaaaggccagggctaatgtggtggtctgcggcggcacgggcagcggcaaaacaaccctgctgaacatactatctaattttattcctgaggacgagcgcattgtgaccatagaggattcagctgagcttcagctaagccagcgtcataccattaccctggaaagccgccctgctaacgctgaggggagcggccgtattactatccgggatctggtgcgaaactccctgcgtatgaggccggaccggattattgtcggtgagtgccgttcgggcgagactctggatatgctccaggcacttaatacagggcatgacggttccatgacaaccgcccatgccaactcctccagggatctgattgcgaggttggagacaatggtgctcatggcaggaatggagctgccggtgcgggcaatccgggaacagattgcttctgctatcgacattatcgtgaaccagtccagactgaaggatggaagcagaaagatagtagagatatctgaggtggtaggtatggaaggtgaggtagtaactctgcagaccttattccgttttaacgtggaaggatatgacgccacaggaaaggtgatgggcagattccagtctaccggcatacgtcccatggttttatctaaaatggaggacagaggtatacatatatcggatacatggtttgcataaggggaatacacaatgaatgaattaatgaaagcagtcatatttggagtttatctgtttggggtactgctcgttctggatagtattctgttttcgaaacagaacactctgaagaaacgtctggaccgtattcaggccatgggtaatccaggtgaggagttgttgagggaagaacctgtacaaaaaaaacagttcaggcggccggcatggtttgatgtatccggccgtcttaagaaagaactggatggagcggggattgcgctgaatcctgtagagttcattgctatatggctggcatcagcagcaatcccgccggcaggcgggtatattgtcacaggcagtgccttaattgcagccgcatgtcttgcggtgggagcagcgattccgacactggtggtaaaggctacaagaaaaaaacgcctgaatcaattctcggttcagctgggggacacgttaatgacagtgggtaactgtctgcgcagcggattttccattggacagtcaattgaacgagttgccacggatatgccggatcccataggtatggaattccgcatggcagttatggagatgaattatggggaatcacttgaaaatgcactgaccgctgtagcggtaaggatggagaacaaagacctggagctggtaaccacggccatccggattcagcagcgggcgggcggaaatctttcagagattattgacaatgtgtccgagaccatcaaagaccgaataagaatccgcaagaatctaaggacactgactgcccagggacgggtatcgggaatggtgctgggcggcctgcctatcgtgtcgcttgccgctatcaccattatgaatcctgaatatacaagcgccttttatactacaagcttcggcgtaaaggccctgctcctggcagccgctatggaggcggctggattcctggtaattaataaaattgtaaacatacaaatctgataataggagacctgcctatgaaaaaagagttttgcctgactatcgctgtctttgtattcagcctggtactggggacagacatgtcatttggcctggacagggaattatatctgcagtatacggaacaaattatagaacgtatggaagcgggggacggggcacaggagacagaaacaggaatatccttcaactcagaggcggaggcaagggattttgcagactatttttataaattaggatatctgggtgaggtacaggtcaatctgcttatgcgtacgtggcaggattgcccgtcctatgtagagattagtgtacggtcttcagatactaaacttgccgcagcccagcagaggcaggcagagcagattttcacaggcatatcggatcaaatcgcttcccggacagatgagcagatggcaagggcggaggctgcttatgattggctttatgcgaattacgcctatgattacagctatgaaagcaaaaagatatatacagctctgaccactggtaaaacagtatgttttggctacgcaggttcctataaggttttatgtgattatctgggactggaatgtgagatgctgtatggctctaatcatgtgtggaaccgggtaaaggtggatggacattggcggtatgttgatattacctgggataagaacctggaagagcacaggtggagacttgtatcggaggatgagtggaaaagcacccatcctttagggaaggagggcagctgatatgtggatgttgattgcggcggttggtgcaggtgtatttatctaccagtttctgaccgagctgctgaagggcagatattccatactggagacgcgtctgaatgagatagccggtataggggagaccagccagaagcaggtaaagcggtgggaaggctctcttatgagcaggatgggcaaggcagcattggaacgtctgtcatctacagtgggaactgtgcttccggtcagcagacgggagaaacagagaatcagtttccttatggccagagctggtttgagaatccagccggaagaatacatggttctgcagattctgtctttgattggcggtgcggtactgggcatgtatttaggttttgtgtttgatagggatatcctgtttttagctgtagcgggtctgtatgccggttacaccgtgttccggcttttttttcggcagaaaatgcgccggcgccagaattctattctagaacagctgccggaattgctggatttgcttagtatcagtgtggaggcaggtctcagcttcaaccaggcgtttcagtatattgcggaacagtgtgagggcccgcttgtggatgaattcatatttgcgggacgggcgatggtgttaggaagaagccggagggccgctttggaagatatgtcctgccgctgcggcctggatgaagtgcagacctttgccagcgctgttatacaagcggacgagatgggaatatcccttagaaatattctggtgtcacaggcagcagaagcaagaaacgccaagcggatgagaatagaggaaagggctcagaaggttccaattaaaatgctccttcccatggcgttattaatcttcccggttcttttaattatactaatggcacctgcggtgcctcagattatgaatgcactgatgtaggaggaaggcccatggtataccagttatatgatgaacaaaatagaacgaagctgttagagcgggtaggacttgcggacgatttctggcttagatttctggggctgatgggaagatcgcatctgccaaaaggagaaggactgtttcttaaaaaggtgggaagcgtccatacctgttttatgcgttttaccattcaggttatatatctggacagggattacagggtaattgcaaaggaagttcttcagccatggagatgcggaaagctgtataagagagccgcacatgtattggagacaggtataacagatggagacaacatccatatagatatgatattaaggctggagagctgtaattaggaaaggagctgtgccattatggaagattatggagagagggagctggaaaaagagggaagaggcgatgaattcagcctgatccgggaacggcttgacagcgcaggcgtggagggacagctaaagacctctttgttcggcggttatgcaaaaaagggagtggaggaaatcatcagtacctataaggatatggtttccatgatgcaggatagttttgaataccagctcagggagctgactgctgagaaggaacgcattggaacagaacgaatggtacttaagaagcagttgcaggatgaactggacaagaacagagagaccattcagcttcagcagcagtacgaagaattgctgagagaccatgagagggcgattaaagagctggaggtgaattgctttgagagacagcggctggagcaggaatacaaagagctaagcagggagtatgaagaatttaagattaggcagaaggaagagcttaataataagcaggaatccgtatccgaaggagtgccggaaggagagtctgtcaggcgcatgatgatccagctggaggagatgacacggtactgtgaggtgatggaggaggaacagaagaatctggaggatcagcttcgcagcatgaagacaattggagaagaactgtcgcgcatgtctgagaaatacgatcagagccggtctgaactgaacgaagccaggaagaagtatatgagtctgcagagagagaaccagtccatgaaccaggagatggagtctgccagccagattattgctgagattatggagcagtttgagcgcaaagaaaaagagaatacagagctcagacagcagctacgggaatacaaacagcagctgatgacagtgaagaaggaaaaattagagagtgatacggcgtatgtgctcctgatggagctgaataacaagcgggaagaggaactgcaaaagagcattgaggaactggaggcggccagaagtgaggcggcggatttgaaacgccgcaataaggagctggaaaataataagattatcaggatacaggcaggtccgggagccgggggtaccaagcaagagcagccggaagttgataaccagacaataaatgaccaggagaccgatatgcagaagatgaaggcgttactggagcgggcggagagtgtatcaaagcgtctgtcaggagaggaagtatcgaatgcgaaagcggacggtgcggacagtaagatagaatatccaattatagagacggaagttttgtagacgcgcagttaggaggataaaatgtacaacgattgtaatatatgtgaaagcagtgataaagagctggagagttatgtaaaaacactgccttatgaaacctccttccacagggtaagcccccaggaagtgaagtgcggattcgggctgcagggaatctgctgccgtctgtgttccaacggaccctgccggattatggaggacagacccagaggcgtctgcggagcagatgccgacaccattgtctgccgtaatttcctgcgcgcagtggccgcgggctctggctgttatatccatgtactggaaaacagtataaagaacttaaagaaagccgctgtgagtaaggaaaaattgggaagtacggaggcggttcggcggctggcgggtatacttgaacttccatatagtggtgatccgcatgagaccgcctttcagatagccggggcaatccgtgacgatctgatgttggactcagatgaaccgatgcacattgtgaaaaagctggcgctgacgaaacggtatgaactgtgggagaagctgggaatcttgccgggaggcgcaaaaacagagattattgacggtgtggtgaagacctccaccaatctttccagcgactgcacggatatgctcctgcactgtctgcgtcttgggatatccacagggatgtatggacttcttctcaccaatctggtcaatgacatactgattggagagccatccatacatatgggagaggctgggctgcatatcattgatcctgcttatataaatgtaatggtaaccgggcatcaggagagtctttacagcaggattgcgcaggagatgagaagcagtgggatgcaggccagagcagaggccgcaggagccaaaggcttcagactcattggctgtacctgcgtcggacaggatatgcaggggcgccagaagttctatggggccacattcgcaggacatgcagggaacaactttgtgagtgaagccgtgctctccaccggagcggtggacgctgtaatttcagagtttaactgtacccttcctggaattgaagcgatttgtgacagtatggatatatgccagatctgccttgatgcggcggcaaaaaagacaggttccctgttggtgccttataattacgatgaggccggagtacaggcggagcagattctggaggaagtgctggaggcgtataagaggcggcgctccaaggtggaattaaggcttttggatacccatggatacaggaactgcgttaccggtgtcagcgaactgaatctgaaagcatttctggggggcagctgggagccgctgcttgatttgataaagagcggagcagtgaaaggaattgccggagtggtaggctgctccagcctggcggatggccatgatactctgacggccagcctgacgagggaactgattcagcgcgatattctggtactgacgggcggctgtacctcaggcggcctggcaaatattgggcttacttccccggaggcagccgaactggcgggagattcactgaagtccgtatgcaagaagcttaatatccctcctgtgctcaattttggttcctgtctggccattggccgtctggagttagttgctgtggaattatcagaagccctgggggtagatattccccagcttccattagtgctttcagcggcccagtggctggaagaacaggcgttgactgacggggcttacggccttgccttaggtctgacggtccacctgggtaccccgccgtttataacagggagcagcatagttacggagacactgacagagggtatggagggcctgacaggcgggcgcattatcatggattcggatggcacgtcagcggcccgccggctggagggaattattatgcggaaaagaggagaacttggcatatgaagaaacgcattatgattcaagcgtcaaaatgtgttggctgtctcaactgctcagctgcatgtaagaatgtacaccggctggaaggtccttccatctttgcgttaaacatgggcagccgcgataatccaccccgcagccggatttaccagaaagacggatcatattatcctgtgttatgccgctgctgcgaagagccggactgtgtcagaagctgtatgagtggagccttgcgcaagaatccggaaaccggctggattgaatatgacagcaaacaatgcgcagcctgttttatgtgtgtcatgatgtgcagatatgggcaccccattccggctcagggagcgaagtccgtaattcgctgcaccttttgtcaggatacggatgagaaagatccggcctgcgtccgggcgtgtcccacgaaagcaatcacaataaaggaggtgggatagcatgggggcatatataattattggaagcagtgcggccggcctttcagcggcgcagaccatacgccgtcttcagccggaccgtgagattattgtgctgtcaaaagataaggcaatctattcccggtgtatgctgcacaagcttttaagcggagagcgcagcatggaatccatagagtttgaaagtattaattttttccaggacaaccggattaactttatgccagggacagaggtggtcagggtagatgaggaagaacgggtccttattctggcggatgggaagaagctgttattcgaaaaaatactggttgcctccgggtctgagtacttcatgccgccaattccaaatttcaggtatgcccaaaatgtatacggctttcgcagcttggacgatgtgaatcagattcggaagggaataggtaaatatggccgccatgccgttattatcgggggcggcatcctgggattggacgttgcctatggacttttaaaatgtggccttcaggtaacggtgctggaaaaggaaaaacgtcttatgcctctgcaggcagacgagtttgcctccggactctacgagaatgcgtttcgcggtgcgggatgccgtattatgacaggtgctgcagttaaggactcaaatataaatatggaagaaaacattgaagctgttctgctggaggacggaatggagattccctgcgattttgtggtggttgccaccagtgtaaagccgcagatggattttctgaacggcacatccattcaggccctgcacatgaattatcacattcacacggtgctcagccactacctgcgcaagacaggggtaaaggtgaataaagggctggaagtggatcgttatatggagacgaatgtatctggtatctacgctgcaggcgatgttaccggaatgtccggtatatggccggacgcacggcagatggggcagattgcagcatataacatgtgtggtgtgcctgccagaaggccagagacatttatagaaaagaactctgtaaatttttatggaatcaccatggtgtctatgggccgggtcaatgcagatccgcaggtatatgatatattaacacaccatagtaaaggaagttataccaaactggttctccgggacggctgcatggaaggcgcactgctgctgggaaatcttcaaaattgcggtgtttaccagtatctgctccaggagcataagagtatagagggactggaaaaacgtctctttaaactgagttttgctgattggtatggaattgacgaagaaactgcggaatatgtgtatcagtgataggaaagacatggatattgggagatgagaaaatgacaggacgaaaaacagaggaatctggccagagcctggttgagtgtgcgattattctgccgctactggtgctggtaatgtccgtggtaattgaatttggctggataattatgaatcggatgaatttcgataatatggcgttggtggcggtgcatgcaaatgccaagacggacagcggacaggctgcggattttcttgaaaaatatgtgcgggataattttgacaggttcgatgacagcagcctgacagtatctgcatctactgaggtccagacgtactactacgatgaatatgtatggaaatccaaccagcacaaacattggcaggtaccaatgtatttcgatattctgcataccgaaatggatatttcctacgaaatgccgtatctgacaccgatgggaaaggtgcttttccaggatacggacaatacgatgacgctaactacaaaaacaatggccagcagggctctggctaatgactcggttgcagcggtggatggaggagacgatggtgattagaaggcgtcggacctgcagagagggaggtcaggccattttggaatttgctctggtacttccggttctcattctgattattatggcatgtatcgagtatggatggtattttaccagccgatatgagttaggcacctattccagggagataggttataatattaaggaaccatttaacctgtactggaagcatgagactgctcccagagactgggtggattcctctaaaaacagaaagcctagctggctgacagcggatgagaaaagagactggagctttgatgagtatgatggctggtatgcattttcggcgccagctgcagatgatataatagggcacaattattatattgcggcaatggattcaaaggattttttcatttcacgattgaagcatactggaatcgttctggacgaagataaagtcgattacacaatcaacggtggctggtacattaaggccgaggcccttaatatgcctatgggaggtggaagttcctggaagcagaagcgtaaacaggaacggtctgagttttattatgtggatgtcacagtagatgtattctatgaatatgaacccatcacttttattggaaagctccttcttgctcccaatggaagtgatactgtgagtcttgaggagagcagccgctatacctataatttaccgccgtcctggctgtctaactagaaagcactagaataaaaggggcaggcacgcttaagggtaagggacgaaaggagaatgaccgtatgaggacgaaatattataatcatgctcaggaagagggcagcgttatgataataggaggcatgggccttatcattgccattatgattatggcgctgctgatggatatgggaatgtattataacagttaccgcaggctcaaggctgtgtctgactttgcaaacgaggaggttacacagatgcttccttattatgcttactctggagattatgtggaagcatttaaccggagtctggacgcggcgctggatggtcatgggtacacatcaagtaacgtgaaaaaaagtgaaatcgaccggaatacatctctgaatatgtcatggacagttattgtttcaaccgatattatacttgaggatgagtactattgcatgtttgcgtcaattatcggtatcaataaaataccaatacgggtgtccgcaaagagcagacagcctatgtctataggtgaaccatactacgatggtcagccatatgaggtttggggagaagatggggcggatccttaaagtaacttcataacctcatctgcgaagtaaccgtgtttacatccttataaaccgctgcaaatgcatttccataggcttccgctaatacgcgtggttttttgcggcttgtacgagttccttcatggcaattgatacatgacaaggatccgggaacagagattcgtcagccgcctgcaaatagtgtccccagataattaattcgtccaactggctgtaaatacatttcaaagagtggcagggaagcatctggataaagctgctcataagaatctgaaacgacaggggagtagtccggctgccttgtgcagccgaaagtctgtcctccataaacaatgcaaggttttcggacaaagaagaaaaggaagcggcacaactgcctgcggtgagcgctacaatctggagcgcattcataaaataagttaaccgctctcgaataagcggttctgaaaaatctatactgccgctgattgctgttgttccatttagtgccacggtcccttttttgtcgattgtccgggcaaagcccagggaattgagcagagcaaccgccctgcttgccgtatccttcatcacaccatattcctccatcagtttagggatggagggaagatacttatgtccgtcaaattccccattcataattctgcggatgattgtcatggttaggcgggcatataattcacagcggtctttggttcggaaccaagttatcgtatcgcccgtctgttcgcgttcatcagtatatctgcttagagcgcatagataatggtcaaccctctcagccgacgctcggtataaaagcgatgtcccgtcatgaaattcttcaaattgcctgttctcaatctgatggatggcattctgcatccagacctttaaacgttctgctgacagagcaaagggattttccatgccgggtatgggaatatatggaatatgcaggtaattttcgctgtccagttccaaatccataatcagttggttattcagagggcgcagcaatgcagtcataaaaagattggcctgcttatagagactggctagtgacatctgttcagatatctcccccagtagattccggaaatacttaaactctgactccccgcagcgtttagctccttcgcggtaaagaacgggcatgagaagctccaggcctttgtaggcgtccgcgattcctctgcggcgttttactaagaatgagatatatttcttttcagaagtttggcaggtaacgatggaaggctgcccctgggcagtgtggatatacccttcttgattcaatattttcagtacctttcggatggtcgtgattcccacattatattgcatacaaagttcccgttgggatggaaatatctgccccggcatataggcgccgcttaaaaactgtattttaagtatctgaagtgtgtattcatatagattctgactttgtttcatccgaataatgcctcctcatttttttattatagcagttttgtggacaaattacaatttgcttctcctttcagtgtctgctgaaactacttgtagttaaaatgggaaagatgtataattacaaagagtatgcaaaaccatgaacgtgcttgagtacaattagaacatggaaacagaaaccattatgattatagatgggggcagttgaatgcatatctcacaaatgaatatatggatggctaccaggtcagttattcggtcatgacggaaattaccaatgtgatacatgagacggaacaagttcagtctgtaattgtttcacggttttacatcagtccctgttctggaagtggctttatgattaaagataaaattcaaaccatatttacatgatattaaaccaaagaagagggaacaacatggctgattttattgaggaattggatggaatgaatgagctcatatatatagcggatatagatacctatgagctgctgtatatgaatacttgcggattaaagcagtttggcttaaaaagcaggcaggaaatctcagggcggaaatgctatgaagttctgcagggaattgattcaccttgctctttctgtactaacagtaagctgagcagggatgaatattatgaatggcagacacagaacccggttaccaagcatcaatatctgttgaaggataagctcattacttatgagggcagaaacgtgcgcatggaaattgccatggacatttcaaagtttctgtcacaggagcatcaaatcaaggtgttattcgaaaatgaacaaatagccatggagtgtgcccgtgctttgcaggatacacgggacgacagacaagcaattgagcaggcactggaactgcttgggaaaaagctgaagggagaccgtacctatatatttgaaatacatgatttgctgatggataatatttacgaatggtgtgcacctgcaattaaagcacaaaaggaggagctgcaggggattccccaggaggtctgtcatcactggattgaggcctttgagcagagaaaaccgtacattatcagcaatctggaagagcatgccgaaatagagcctgccgagtatgagcgtcttaagccgcagggcatacactcattgattacggtaccgctgtttgatcaggatcagctttttggttttattgggattgataaccctccgtatgaaaatggcagcaacatcattgagatttttcagatactggcatattttatccaggcagtcttaatccgtatgcgcaccaacgaaaagctccgcaaaaaaacttatatggatgaattgacaggttcaaaaaatcagaatgcctatctgcatgaagtggaaatactgaatgcccagcttcagtttgataaacagaatgcggaaaacgttggaatgggagctgtttttgtggatgccaatggtctgaaggagataaatgatacggtcggccatgaagcaggagataagctgcttatccatattgcgcagaaaatcatgcagtttttccccgcaaagcatgtgtaccgcactggcggtgatgaatttgttgttctgtccaatcatgttgaggagaatgcattccttcaagaggcagtaaagctacgggacagcttacgtgagttcgaggctggtcagggtgataaagccgctgtgggggtctgttggtcccgtgatgctgtttatgtagaagaaattgtaaacaaggctgaatcagagatgtatgaatcaaaaaaacagtattataaaaagggatgccgaaaggtccgctccttttctgaagattatgatttactggatacctataccaccctatcgtttaaggactcggatgtaatattggaagcgaccaagttactgcatctgattgttgagcgttggaatgaagaacagctgagaatgatgctggatgatgattttatcttgtttgaagaagaatatcaaaaggtgttccgaggcagggaggcaatcaccttcctgaaaaagcagcaggaaggaaatgatggacagaaattacgtgatatgcagttctttcgtaagcgtattgtcaagggagtcagcattttaagctgttacggacagttggatgtgaaaaacaaagaagggaaaacctgcagtataccagtggatgcaaccctgatgctggtacagaaaaatggacgtattaaatgtttgtatatgcacagtaccaatattggccggcacaaagaatatgaggaatatttccagcgaaacgccaacacggcgtattcaaatctgatggcagagtttgctgacggaaccaactctttgattaagccagatgatgctttgaattcatgcagccttctgatgaatgcctttgagctgctgctgcaaaaatatagtaacgtatactttgtcaacataaatgcggatttttatataacactcagatcggagaataagttccagcccctggttggttcgtcaggcagcttcacctgtattaatgtaaactatgcagaacagtacatggacgaaataaataaaattaaataccacaactttaccagcagaaaaaatctgctggacaatttggaagagggaaacaggttcatttccatgaccttctttgtagataaggatagcgacaaaaaaggcagggaggttgaggtggatatctggctgggggatctgtcaggggaagcttcctgtatttttgcttttaaaaacattactgaacacccaaatttcattgagtttatagaaacagataatctgaccggtttagccagctatgaaaaattccgcaaaaatgggcaggacctgattgaccaaaagttagggagatttgcaattgtttcaattgatttccaaaattttaagtacattaatgaggttacaggctacaaaacaggtgataaaatcctgaagaattttgctgctaatttgatgaatatgcaaggcctgcatacgagggtgacagcagaccattttctgacaatgcttgcttatgaccaggattcaaattatgtgattgaaaatgtgagccggaacgttgaacaatttacgatgtcccgaagtgtccagagtgaagacattaaagttgttctgcgcacgggtatctactttgtggaagaaaactgcactaacattgataccgcgattgacaatgctaacattacccggcagtccataggacagactttcagtaatgagattgcagtttataatgaggcgtttgtcagacagaaaagtcttcaaagtaaaatactggccaggatggaaccatcactggagaacggagattttcaggtatggatgcagccgaagatagaccttaagacgggagaactctgcggtgcagaagcattaagccgttggatgaacaatggaactgtctgtttctatcccgatgagtttattcctatttttgagaataatggttttatcaccagccttgatctctatgttttggagactgtatgtaagaatatagcccaatggaaagaactgggctgggatgacatggccagaatcagcatcaatctgtctgtcatggatattatgagggatggtgtggtcgattccatcaaaagaatcgtcaatcgctatcatgtggactacaagctgctggaatttgaattaactgagacaggttatttccaaaatttcaatacagcggcgtatgtaatgaaggaacttcaggatttgggatttttcacttcagtggatgattttggaagcggttacagcgtaatgaatatgctggttaatatgtctgcaaatacgattaaaattgaccgggcatttatgctcaattctatcaagacaaaagcaggctgcacgcttcttgaacgcatcattggtattgtgcacgaattaggatacagtgtattgtgtgagggaatagaaacgcaggagcaactcgatttgctgcggaaaatgggatgcgacgaagggcaaggctacctttttgcaaagccgatgccaatgaatgagtatttcaatacatataaaaacaggtaactgcagtgaagcatcgtatcgtgaaaccttaaccgtaaatacattgcagtagaaagaaaatctgtataagaagagcattgaaacactgtcctgatgtttctgtgctcttttatttatgatgacattgtgataaaaagacaactacaaaggctatttacccatatataaaattgagatttacagtaactcagcttgctattcgttttctaatatgttatattaaatcgagaataaagatgattgtgataaaggttggcggaacaactaagggctgagataaccagtttgaacagccggacaggtgcatatgctgaaaaacttgccggaaagtttaggttacatgggtggatgtcccgggagatatagaacagatgaaccagcaatcattgcccaaagccgctgccatgttacaggaaaaaaagcataaaggaaaataacaggaggaaaagaaaatggcaggaacaggaattacaggtatgttaattacttttgtggggggaatcatcctaatcatggttctggtaatcgtacttattttatatcacaaaaggcaggtggaaaggacttccgccccctttcctcaggtaattcaggacgcggcagtgatggcggttccagaaacggaggattttgataaattcctggtaaggggaatcaaggatgcaggccagtcactgaagggttatgagaggattcagagcggttatgattcgctgcccaactacattatctgctatcgaggtaatgaaatgtatattttgacggcaaaatattcctcccggagaagaattgatgtggatacagagagaattctgcactttaccaaagagcagattaaagagattaagattggtatgggaaaagtggatatcatctttaaaaataagatgttttttgttgcggcagtaagcccgaatctaattgctccacagacggaacagtatgggggatttatgaaatatattaaaaatctggcggcagaggtgaaggcttaagtaaatggaaagatttggaggaatgatggccgctttatcggggcggatggataacagtcaagaattggagcttcgtatccagggaaacatatccagacggtttgaacaggcgttgcagtttttaaggcacagtttgctggcagttgaatatgacgtcaagaggagaagattatgtatctgattgtgtttttaagcgttccattggtgagtgtacttatatgtattaaactgattgagaaaaaggctgagaaaaaacatgaggcgtttttacaggtagtgagggaaggcgcggaaaccgcagttccggaaactgccgggtttgaaatcgttattgcacaaggggcaaaagatatagtttcctcgtttaaaggttatggccggatccagaccggttatgattctttgcccatctttattgtccgctacagggaaaatgaaatgtatattatgacggtgccttatccttccagtacagagatggaggtggaccaggatttcattttacatatcacaacggatattctacaaaaagtggagctcggagctatgggaaaagtctctttttattttaagggcagcaaccgtatctttgcaatgacagtgactgagtatgcaattcctcttatgatgcaggcagctgacagtgaaaaattcaaatcatatataaaagcatttgcagaaagggtaaaatagcggagcagagttatgttattttatgtatgagggccgatacaggtccagaaactcagctattactatgctaaaaaaataaatcgtatagtagatctgccgcttcgcaggcatagatgaatctttacaaaacaggaattgcagtgtatggtatgacaatacactgcaattcctgttttaagtatctgctgcggtttctgggcagtggcggtgagtagaccagcatattatgatgcctgatacatggttatgtgtggtatatcatgatgcaaaagacacatcatccctgccgctacatcatacgaaccaggccaatgaccttgccaagaatctccacggtttctgtaatgataggatccatggcatcgttctccggctggaggcggtaatgtccgttctccttataaaaacgcttgaccgtggctgaatcatccaccagggctacaacaatctccccattggccgcagtgggacactgctccacaatcagtttgtcgccgggcaggattccggcgccaatcatgctttctcccttaacctttaacatgaacgtctccgcgttgggaagaatctctgccgggaaggggaagtagtcctcaatccgctcctccgcaagaatgggttctccggcagctacggttcctacaagagggatattcaccatctctctgcggttaaaattaaaggtgtcgtctaaaatctcaatggtcctgggtttggtagggtcacgccgtatgtagcccttttcctccagggcggacagatgggagtgaacggaagaagtggactttaaatgtactgcctcgcaaatctcccgcacagccggcggatatcccttctgtaaaatagtctctttgatgtattctaaaatctcctgctgcttagaagtaattttatcctgtgccataatcaacctcctgcgttttctatattaatagtaacatatgttcggtaaaaatgcaaacctttgttcgttttttgctgggaacacttgacaaacatttgttctggtagtatagtatggatatacaaaagaacaaacgttctgtattgcgcgcaagaaggaaccgccccagggaggttaccatatgagagtgagaaagagaaggttggcagctacatgttttacggttatactgtttgtctccattattatgggacgcaccatgtttacttccatggccaaagaggaggggagcaggagtactccctattataagagcgtccgtatccaggaaggggacagtctttgggaaattgcccgtcagtacagagaaggcagttccatgagtatggatgagtatgtgaatcagctcaggcagatgaacggtcttaagaaggacaccatccatacagggcagtatctgaccgtagtatattttgagtaaaccaggttagattccgcacctataatatgatatacatctaaaccctttggaggtatccggccagctccaaagggttttatcttttcatggattttctttgtattccggttacatttttacccggaaatttccaagagttccatattatataattttgtaacgttttattgtgcaaaatgatacaaatttctttcttgatgttaagatgccgtgaaaatgaatattatgtgtcgtgatatattacacaaattacagaatgaaatcttcttagatttgtaatattttcttttttataacatttatattatcaatttataaataatatgtatttgaaattattacataaggtgtctataataggcaaaagcaaacgagaagagaaagggggttgtttagtatgaacggtttagtggaatcactgatggaagagcttaactgcaatgtggtgttcaccataccgctgtttggcggtattgatgtgatggaatccgtggtagtgacatggatcatcatggcgattatgatgatagcttccctgatactggtccatggcctgaaggtaaggaacataagtaagaaacaggctgctctggagagcggtatgtcttttatctatgatttttttgaagggcttttgggaaaggaaggaaaggcttatataccatatctgattacagtggtgatatacataggaattgccaatatgattggacttcttggcttcaagtcgccaaccaaggatttgaatgtgaccgtttccctggctgttatgagtattgttctggtggaagtggccggcatccgtaagaagggtgtcaggggatggattaaaagctttgcggagcccattgccatcatagcgccaatcaatgtgctggagctgtttatacggccattgtccctgtgcatgcggttgttcggcaacgtgctgggcgccattgttgtcatggcactcatcaagcatttgctgccgttaattgtgccgctgccattcagcttctattttgatatatttgatggagtgatacaggcatatgtattcgtgttcctcacatcactatatataaaagaagccattgaggattaagtttgcagccttatggaaaaagaaaatattgagagaaaaaggagagtcttattatgacaggattaatcgcattaggagcaggtgttgcagttgttacaggtattggagcaggtataggtatcggcttggccacttccaaggcagtggacgctattgcaagacagcctgaggcagacggcaagattacaaaggcacttctgttaggatgcgcccttgctgaggcaaccgccatttacggctttgtcatcggccttttaatcattctgttcttaaaataatttatagcaggaaggcgacttaatatgttaaatttaaacatttggaatgtagcctttacggttattaacctactggttttatatctgtttatgaagcacttcctgattggtccggtgcgcagtatactggatgagaggaagcagatgattgagcacgacctggacgaggcaaagaacagggaaacggaagcgcgtcagatgaaggagcagtatcaggcctccatcggcaatgcagatgaagaagcttcaagaatcatcgaggaagccaggaacagggctgccgcagagtacgagaaggttctggcccaggccagggcagacgctgccaaaaagatggaagaggcagaccgtactattgccctggagcgcgagaaagccatgaatgacctgaaggccggagtggccggtttggccatgacagctgctgccaagctgattaacgagcagagcgcaccggacagcgacaggaacctatacaaccgctttttagcagaatcaggtgaaggaaatgactgagacagccagaacgtatgccattgttctatatgaactgggcataccggaagagatggtcagggaagctgtaaagctgcttaaggagaatccggaacttccggaggtccttaatagcccggtggttcccctgaaaagtaagcatgccgttattgagaaggtgttcagggaaccggaattttccgcactgatggtacgtttcttaaaaaaggcttgtgatgcgggatgcatcggacagacagaggagattgcaaaagcccgtgacgcctatgccagaatggcggccggtgttatggatgccgagcttcactatgttaccatgccgggtgcggcccagattacaggaatgaaacagtttctgtgcaggaaatataacaaaaaagatgtgaacatccgattggtgaaccagccggacctggtgggcggttttgtcctgaaggccggggatacagaatatgactacagcctgaaggggcagctggtaaggctgggccgggctgtggtaagataggagtcttgatatgagcacaatcagttcccaggaaatcatctccattattaagagtgagattgagaattttgacatgcatgccggacaggaacaggaaactggttctgttatctgggtaggagacggcatagcaattgtatacggcattgaacatgccatgtacggggaaatcgttatatttgaaaatggtgttaagggaatggtccaggatatccgcaggaatgagattggctgtatccttttcggaaaggatacaggagtgggccagggtaccaaggtggtccgcaccaggaaaagggcaggcgtgcctgtgggaagcggattcttaggcagggtggtcaacgctctgggagagcccattgacggactgggccctgtaaaggaagaagattatctcccggtggaggaggaagctcccggtattgtggacaggaaatcagtgggagttcccatggagacaggtattcttgccattgactccatgtttcccataggccgcggccagagagaattaatcattggagaccggcagaccggtaagacctccattgcaatggataccatactgaaccagaagggcaaggatgtggtctgcatctatgtggccattggccagaaagcatccaccgtggcaaagctggtttccacccttaagaagaacgatgccatggattataccattgtcatgtcgtccacggccagtgaggcagcgccccttcagtacatagcaccctatgccgggactgccatggctgaatattttatgcatcaggggaaggacgttctgattatttacgatgacctgtccaagcacgcagtggcctacagggcattgtccctgctgttagagcgttctccgggccgtgaggcttatccgggcgacgtgttctatcttcattcacgtcttctggaacgttccagcagactttgtgatgaaaagggaggcggctccattacagcccttcccatcattgagacacaggcaggggatgtatcggcctatatccctaccaatgttatatctattacagacggtcagatattcctggaaagcgacctgtttttctccggcatgaggccggctgtgaacgtgggactttccgtgtcacgtgtaggtggtgcagcccagacaaaggccatgaagaaggcatcgggaagtatccgtatcgacctggcgcagtaccgggagatggaggtattcacccagttcagttctgatctggatgaggctaccaaggagcagctggcttacggaaagcggcttatggagctgcttaagcagcctctgggaaggcccctcagcttgcatgaacaggtcattaccctctgcgcggcgacccacaaggtcatgctttccgtagaggtttcggatattaaggaattccagatgaacatgctggcctggtttgatgaaaagcatccggagattggaaaagaaatcgaggagaccaaggtcctgggcgatgacttgataaaccgtattgtggatgctgcaaaccagtataagacaaaccaatataaggcgtccgtctgaccaggaagaaggagttaatatggcaaatgcaagagaaatcctaagccgtatgaaaagcgtccaggatacccggaagattaccaatgccatgtacctgatttcctccaccaagcttaagaaaagcaagaaacttctggaggaaacagagccttacttctatagccttcaggatttgatacgccgtatcctgcgccatatgccggatgtagagcatttttacttcaatcccaggaaggaaatcaaggaggaggacagggtaaaggggctgattgtcattaccggtgataagggattggcaggcgcttacaaccataatgtgctgaagatggcccatgagtggatggaacagagtaagaaccaccggctttatgtggtgggagaactgggacgccattattttgaggccagacatgtccaggtggaggagcagttccattacacggtacagaatcccaccatgcatcgcgcccgtctgatttcctctactatattggaggattacgaggaaggacgtctggatgaggtttggattatatatacacagatgatgaacagcatgcagatggaagcggagatgacagagcttcttccccttaaacgtgaggatttcagcaatatcgttatccctgcggatatcatccaggaggagatacagatggtgccttcccccagcgccgtcatggaccatgtggtccccaactatgtgaccggattcatattcggtgccctggtggagtccttctgcagcgagcagaatgccaggatgatggccatgcagtctgccagcgacaatgccaacgcaattttaaatgacttgtctatagagtacaaccgtgtgaggcaggcggctattacccaggaaatcacagaggtaatcagcggtgcaaaggcacaaaaaaagaaacaatcgtaaattcgtaaatataaaaggaggcagccatgagcaagggaaaaattatacaggtcatgggacctgtagttgacgtggcttttgaggatgatggacttccccatatcaaggatgccctggtggtggataatcagggtaagaagtgcgtcatggaagtggcccagcatgtaggcggcaatgtggtgcgctgcattatgctggcatccagcgacggcctgtgcaaggatatggaagtggagccaacaggcgccggtattcaggttcctgtaggcgagaagaccctggggcgtctcttcaacgtattgggcgagaccattgacggaggagagagcctggaaggcgaggataagtgggtcatccacagggacccgccgtcttttgaggaccagagccctgttgtggagatgttggagactggtattaaggtaattgatttgctggccccctatgccaagggaggaaaaataggtctctttggcggcgcaggtgtgggcaagaccgtactgatacaggagctgataaccaatatagcaacggaacacggcggatactccattttcacgggcgtgggagagcgttcccgtgagggaaatgacctgtggaccgagatgagggagtcaggggtgctggaaaagacagccctggtattcggacagatgaatgaacctccgggggcccgtatgcgtgtggccgagacagggctgaccatggctgagtacttcagagatgtggagcatcagaacgtacttctgtttattgacaacatattccgttttgtccaggccggttccgaggtatccgccctgttggggcgtatgccttcggctgtgggatatcagcctaccctggccactgaggtgggcgaattacaggaaaggattgcgtccaccaagaatggttccgttacttcggtccaggctgtttatgtgcctgctgatgatttgactgacccagcgcctgctactacctttgcacatctggatgccaccacggtattgtccagaaagattgtggagcagggcatttatccggctgtagaccctctggaatccacctcccgtatcctggaagaggatgtggttgggaaagagcactatgaggtggcaaacaaggtgcagcagatgcttcagaagtataaggagctgcaggacatcattgccattctgggtatggaggagctgtctgaggatgataagctgactgtaaaccgggccagaaagatccagcggtttctatcccagccattccatgtggcggaaaactttaccggtgtacctggtaaatatgtgcctgtaaaagaaacgatccggggattcaaggccatcattgacggcgagatggatgagtacccggaggctgcatttttcaatgtgggtaccattgacgaagttgcggagaaggccaagaccctggagcatcatgaggcttaaccaggactgtctgacgcagaaaggagccgggatatgtctgcattttggctgaaaattgtagccagcgaccacatattttataatggacattgttcatatctggcagtgccagcaccggacggtgagatgggcattatgcctcaccatgaggctatgattctggctatccaggaggggaacctccgttttaaggtgccggaggaaacagaatggcatcaggccattgtgggccgcgggatcctgcaggtggctaataaccgtgtgaccatgattgtggacacagcggagcggcctgaggacattgacgaggtcagagccagggaggcgctggagcgcgcacaagagcagctgcgccagcaactgagcctgagggagttcaagatgtcccaggcatccatggcaagggcgcttaccaggctaaagggaagccatctgaaggaacttaagtgacggaagaatatttatagcagcttgattatagtaatatgtaagatatgatggtaagagaagtataaaggtatggctgtgggactgaaatgtcctacagccattttgaattttgtatgagaaaattgcagaagtccatgacgataggattgtccttgccgagaggagaacacatgaggataatctgacggcggcatacctgatccctgatgggaagcagctttaccggggagtggggagacatggggccccattcgccgcccaatggtccccaggagtactggggccagaatccgatgccaaggccggcagcaatcaggttcctgactgactctgtggtatcactttcaaaaattacgttagggacaaaatccgcctctgaaaagtagctgttgcatatctggcggatgggcctggaaccggccagacatatgtatcccgcattccttgtgtcagccagattgatagaatccttatccccatagggagaatgtgtggggactgccagatacaggtcctcttccagcataaccatgtaatcctcataatcagtattttttaagtctgaccgcaccgcagacacgcataaatcatagtccgaatggttttcagcctggtacagctggaaatttacatctggccgcagggccctgtaggcaataatccggttggtaatcagggtggaggccgccaaaagctttaaatggatggtatggctggacatgtactggtcggccctcagttcgccgggaatccggtccagggcgcttacaatgggaatcagccgcttttgaagaaggcgtccggcttcattcagttccacacttctgctttttctctcaaagagcggcacacccagctctgcctctaaccggtggatggcctgagagagggccggctgcgctatctgaagatgttcggccgccttagtcatatgctggtattcagcggctgtcaaaaaatatcgtaattgcagtaattccatatgtcacctcagagatatgattttacgaacaggggagccccgcccgggtatccgactattatataacagaattcaaaaaaatgcattcaaattttaaatgagaaaaaaactctcatataatttaaagtatgagaaaaaaactcaatacaatagaagatgaaaaaacttaaagaaaatgagaattattccctgtttcagctattgtaaattcatgtgtggtctgataatattgtattgaagttagccacgactaacaaagaagacgatatgggagaaatattttaaaggaaatatgtctgaggggaataggccaagggatgagtaatcagagacagattgaacctatgaatctctcgggtgtaaaaaaattctgagacaggcggaggtaattcgtgagcaaggaaaccttacatctaatgttaaagctgaatacggaagatttggatacccaggtggcattgcagtgcgcgccgttactgacaggtatgaagatatcaaaccttctaacggtaggacgttccaaaagggcggcggttctggaattgtttaaagaaacagccgtgtcctgctgcattctgtatgaatcatctgagaaaaccacttttcttctttatatcaggccggctcttgaagcgtatctgtcccggcctgaggtaaaggtccttatggaacgctttggttacaggggatgggatttggaagagattttaagccttgtgtccatcaaatatgaggagcacatggaagactgcgccgggttccctcatgagataggtctgttgttgggttatcctgccaaggatgtgacaggatttatcgagaataacggaaagaatttcctttatataggatactggaaggtttattcggatctttctgagtgcaagcgcatatttcagtcatacaatcatgcccgtgagcacattatccatatggtttcccgcggtatgaagattgatgcaatcttaaggatacacaatctgaatcaatataaatcaatgacaatataaggaggatatacgacatgaatcagattatggtagtttactggtcacagacaggcaacacagaggccatggccaatgcggtggcggaaggcatcaggaaggccggaaaggatgccctggtgacagaggtctccaatatttcggcagatgcgctgaaggatgcaggcgtttttgccctgggatgcccggctatgggagcagaagtcctggaagagagtgagatggatccgtttgtggcagaggtggagacgtttgcttccggtaagcatattggtctctttggctcctatggatggggtgatggagagtggatgcgcgactggcaggcccgtatggccaatgcaggagccgacgtagtgggaggagaaggcgtcattgcccaggagagtccgggcgaagatgcactcaatcagtgcagggagctgggagaggctctggcggccgcagaagcataatgcagaatcataattgcagataccatgtcttttggcagacctttcggtttgcctttttttggcgctatggtataatgatggaatggtgtcatgattttataaaagcagcagggggatataaaacttatggaaaactcagaaggcagaggcaggattaaccgaaaggagggcagaggatgcagaaggagctccatctcttttaaaatcagcctgagccttttactggtactgattccctttttaattatacttattaccatggcctgtgtcatggcagccggggccatttccgccctgaatgacaaaatactggaggttcagacagattatgcagtctccagcgtggatgactttttcagcagcaaggttacagcagccggcatgtttcgggataatgatgatttgcagacatattttgcatctgtctccagggaggaggatatcagtgcttataaccaactggacgatgtgctgagggtgcttaatagtgctttggttcagatgggggaaaaggagaaggtgatggaggcctgggtggcagatccaaggacagacagctaccttctgtcaaacggcagtgtggtggacgccggtttggaggatactcaatggtatgaatctgtgatttcagggggaagtaccatcataacagaaccatttctggatccggccactcatgagatgattgtctccatcgtgtcaccggtggtatccgggaatggttcagagataacaggtctttttggatttgacgtatacctggatacacttaagcagacactttccgatataaaggtaggagaggcaggatacctggagttgatttccaacagctcggattacatctacagcgacgaccccactgcatccggcaaaaatgtcagtgagataaaaatatcggatgattataaaaacaaggtaaaaaataattacaatggatttgcggattttacatattccggcgtcaaatacacagccatgttccggaactgtgatacaacggactggctggccgtggctacgctgcctttgtcagaagtaaaccacacccgcaattatctgatagagacaatggcgttcgtgtccattctgatgctggccctgctggtcctgctgattgtatttgcggtccgcagggtgctgaagcctctggggggcatcagcgccagtatggaggcattttccagggggaatctggatgtggatatacgggctgccggggatgatgagattggaagactgtctgaaagcgtccgttcctcagtccgctccttaaaggatatcatcaaggatatcacctatatactgacagaggtttcggcgggaaacctggctgtgccggtggaggggaattatataggtgatttcaggtttatccgggaagctctggagcaaatcatcgcttctctgaatgataccttaaggcaaataaacatctcggcagagcaggtttcctgcggttcggaacaggtttccgcgggggcccagacactgtccaggggggctgcggaacaggcaggatccgtggaggaactggccactgttatcaatgacctttcccagaagattacatccaatgccgacctcgcctcagagggcagccgcttggccgcaaatgtgggagaggaggctgtaaaaagcgatggcaggatgcaggagctgcagaacgccatacacaatattaagaccagtacctttaaaatacgtgaaatcatcaggaccatagaggatattgcgtttcaaaccaacatactggctatcaatgctgctgtggaggctgcacgggccggggacgcggggaagggatttgccgtggtggcaggggaggtcagaaacctggcatccaaaagcgcccaggcatccaggaattcagctgaccttatcacccattcgttaaaggcagtggaggatgggacactaattgtggacgccacagctgtttccatgcgaaatgcattgaacggggtgcagaatgtggtaaagaccatggacgatatagcgtctgcatccagggaacaggcgtattccgtggaacaggtgacccgggagatggaacagatagcaggcgtgattcaggagaattcagccacggccgaggaaagcgcggcagccagcgaggagctttcagcccaggcgctgctgctgaaaggactcttagagcggttccgttttgacaatacggatgtactgtgacaggattttatcatcaacccttatcatttgttcttgacacctacatatagtaggtgtaaactgagtataagaactacaaaatgtaggtgaaaggggttggtcagatggagaaggaaatatcactgcctgaggcgcaaatggaggttatggaggtcatctgggacaaaggaggaaggaccatgttcggcgttctgggggaggaactggcagccaggggaaagtcttggaagcccaataccattctgactctgttatcacgtctgactgaaaatggtatgctgaccgtgcgcaagcagggcaggctgaacgaatatgtttccctggtgtccagggaggagtaccggcagacccaggcccggcttctggtagaccggatatttggcggagacacaaagcatctgatatccgctcttgtcagtcaggaatatctgacggaggaggattatgaggagctgaaggcgttctgggagaagggaggagataagggatgaatatgtgcctgaagatgctctttaccctgtcactgtcaggaacagcactgattttggtgctccttggagccacacggatatttggcagccatatggggcgcagatggcagtattacatctggctggcagccgtgctcaggctgcttttgcccataccatccccggccggccttatctttccggatgctttaagcagcgggatgtccgccggccttctgtctgacggggggaatctttatgcctggatggatggacgttccggcagcggaaatcctgcgggacagccggaatcggttatgggagtgcgtccgggaacggggacggagagattggcggaaacaggagatatggaggagatggctttcacggtgggagataccgcaaaagctgataccgcaaaggcctataccgcaaaggcccctgggctgtatctgtttctccttacactgtggctgtctgtggccgctttgctgatgggaagaaggatatggaattacaggtccgcagccaggctgtataagagaaatgaatccctggctattgcccgtgatggggggctggaggcctatggcgcaccgctggaggaagcctgccgtgtctgcggcctgaacaggagaccgaggctggtggtcagcagcacccttccttcgccggtgacaatggggctgttgtcccctgttatcatcatgcctggtgattttccggcagagagggcatattatgtatttctgcatgagctcacccatgtccggcgtatggatgggttttacaagtggctggtggaggcggccgtatgcctgcactggtttaacccggctgtgtatgtgctgcaaaaggaggtatcccgggcctgtgaactgtcctgtgacgaggaggtaatccgccgtatggacggcaggaataaacacctttatggcgagattctcctcaccgcgctcaggcgccgtcccatgccggtgagtgcagatatgggccttcctctcagtgaaaatgcaaagtggatgaaggagaggctggtttcgatcatggaattcagaaagagaagcaggccatggtccctggcagcctgtataatgtctgcaacaatcgtgtccatggctgtgctgtgcggatttgctccgttacagagggaaaatgggacggttggggcagagaatgttctgacaggcgcggcagatcggctgggagcgcagacgatagcgggaattgggaaagcagatacatccgtcaggtccggcgggagctttgccgattcagaaacgatcagctggaatgagtatgaggatgtgcgccgcagtccggaccagaaaagccttcagacaaaaatgttctgggccaatggttatatcgtggttctggcctggaacgtggaccccggccagtatgatgtagtccggcaggttgacggaaagcctttatgctttactggcaggacggagcaatatgcagataacagcgccatagctgaggcagtgcggcagtccattgaaaagcaaaagctgagtaagagcaaatacgggttccggccggagcagatggccctgttggaagcggcaggcccctttgaaggtacggcggatgaattggcccggcgcttctatgaggcggataatctgtcctactttgcagccgtgtcaggcagtgtaagcccggaaacctgtgccagcctgatggaacagttttatgccgagaaccagatagagtattttgccattatctcggaaaatgatgccccatcccttaaggccagaaaaacagagatggcaaagcaggctgccagggccgggaatacggacattttttccatattaaaggatgagctgacggatgctgataaggcggaaatcgcccggaatgcataccagacagaccatgcagatatattctatatgacatatgagtcattgaatcaggaacaggccggggaaatggctattcaggcttatgaagaggaccgggtggaatatctctatgttcttaaggagcggctgtcctccagccagatttcatccctgaaggaacgtgccggaagggatgggaagcaggagttcttatatgtgctggattaaccgtatgaggtaagtaaaaatgtgtttggccatgcagcagggcagcgcaggaatttgggcgccgccctgtattgcacatcaggttccggcagtttgaatggcagctttaatggctgtcttaatggaaacctttacaaggaattaacttgtaaaagcagatggaggggtgttagaatatattatttagtaaatggattggcacagagcccggaacaggactgtgctcccgggacggaggagctacatgaatcaatttgtcacggaacagattatctacgtattacggctggtggccgctgctctctgcggcggccttattggctgcgagaggcagagtaaaaagaagacggcaggcaccaggacccatgtaattattgctgtggcctctgccatgatgatgattatttccaagtatgggttcggggatgtgctgaacgagtatgtaaaactggacccttcccgtgtggctgcgggggtggttacggccattggctttattggttcaggcatcattattttccggaacaacagcgtgaacggaatcactacctcggccggaatatgggcgactgtgggcgtgggtatgtccatgggagcgggaatgtatattctgggggctgtatccacggctatcgtgatgctctcggaactgttcctgggcaggaaaggttatttttccagaaggaacggggaggacaaagaggtggaaattgaatactgcgaaagtctggatgaggacatcttccagttcatcaaccggacattgcaggaccagaactgcaagatggtgaatatccagcttacagaggaggcgtccacctatgtgctgacggcccagttaaaaacgcctgcggattacgatatgtccggactggtgggagagcttaagaaaaaaggccagctgaagcgtatatccgtgcagtgagcctgtcatagaacatgattggcagctgagtgatgaacgggggcaaaagaggatgatcaaagagactcagaataaaccggaacaggaaagaaaggcggaaaaggccgtgctgtccggccggcaaaaactgcttatcagggcgccccggactataagaatcataggtgcgattggaatcgtattcgggggcctgatgtcgttttggtgctatcgggattacctaaatggcaatgagactgcgtcggcaggtatgtccctgggatttttactgatttttggcaccatgggtttatggctttggtgttatggatgcagaatgctccaggtcaaaggggaggagatcttgtttcgggatatatttttcagaaaacacagatacagcctggatgatatatgcagtgtgagatggaaccatgacggctttttattttcaggcagtaccggtaagctgtttaaaatttacggctactgcccggattgtaagcggctgtttgaactgttggaggaacggggagcacaggtggaccttccggggcgaatgttcagcccggagcagactgcggcggttcatccggatcctgataaacgccgtttcctggtcaggacttccccgtggcttccaaaagaagtgtcaaagattgaggtgagaggaaggcagcttgctgtaagtaaactgttccggaaagagtttacatgcagctgtctggatgttgcaaaaatacagctgaaggaaaataaggaaggaagactgaacgcccggatttacggcggggaaggaacgtgtctggcaaaggtacggaccttttcagcagatgcgtctgatatgcgctgcgcatttgccttcctgcgtcacatgatagagcttggcattccagtcgagggggcggaaaaaacaagtgagtatgtccggtgcctgctgcagaacagatttgtgtctttttcaataggacaatctctttttaaggaggaataccaacggatttgcccgctgcttaacagatatgcggcagttttttcggatttgggaatacagatggaatatggtcccattgacaaagagcagaaggaggaactggagaagagcctggcgttggaaaagattacgtatgataccttcaaccgcggatttttcatatgccttcaaagagacggtcagatgcttttcgataaaaaggcatccctgcctttggctgagatggtgatgctattggcggaggcgccggaaatggggaggggaaggcgggaggaccgatacctggaggaccagggcatggcagccgtacaaaatcttctgtacttccagcccataccggaaatcgtgatacagcagatactggaatattttctgaataaggtcaaaaagaaacagatacatatatctgacattaaaagggactggtcgtgattttgtccccgcctgtatcctgggtcatgtttttgctgtgcacaacaggtgggccagaacatatgacagaccgtgcggcgggaagtctgcacagtctgcacgctctgtccggtactgtaaattatttctgtccggtactgtaaattatttctgtccggtactgtaattctatttctcccgaagcctgaccttattcctggcgctgcgtcttctctcatcctccagcgcggcatagtgccgcttagtggtattgacatcggagtggccaagcacatcggccaccagatagatgtcgcctgtctccctgtacaggttggtgccataggtgctgcgcagcttgtgaggggtgattggttttaaaggagctacggtgcgggcatactttttaaccagattttccacgctgcgcacagccattcgcctgcgctgcagggagagaaaaagggcgtcctcatgtccctgctccgggatgatgcggtcgcgttcctccaggtagtctaaaagggcgtcctccacctctgttccgaagtatacggtcacctccttgccgcccttgcggtatatgcggatgccgccgttcttaaaatcaatgtcggagatattcagccccacacattcagacacacggattccggttcccagaaggagggtaagaagggccaggtcccgcgtctttgttttggcatggtaacttttctgcttatcggtcagcttgtcaccctgttccacctcgtccagaagaagggccacctcatccacgtccagccgaatgatttccttttcatggagcttgggcaattgtaccagggccgccggattgttcttaattcgctcgttcctgtaatagtaattgtagaaacttttcagggaggatatttttcgcatgattccccgttccttgttcatgacctcctggttcttgtcattgaaacggtatttcaggtattccatatattcctcaaaatccgtgacagacagctggtccagctggtccagtttgatatcctgcaccgtaatcctggcaagggccggattttccttatggaggaaatcaaagaacacatgcaggtcataggcataggcgatcctggtcctggaggatgtcctgggctcgattccgcggaaaaagtctccgcagaatggcggcaggtcttttatcagattgcgcagccgcagaatgttttcccggtctacctgttcatggtatgataattgactcatgtaagtggatgcctcatttcataaaaagtattgtcgtgtcagacacgctataatatatattttagcgtcaactgcaaatgattgtcaattgattgttttttccttatggattttgttgtataatagagcaattcagataaacaaacagagaaagaaggcaacatggaattaaaattagaatttggcggccaatcctgcggcgtgtccatcttccttcctaaagggacaaagccggagaaaaaggcggcggatgaactgaaatcaatgatggaacttaccggtactgtggagcggatgaaagagtccggcgttttttcggcggaaaaggaacactctgtcataaaggcagcagtgactccggattttcacaagggagccggcattcctatcggcactgtgctgttgacagagggattcgtgataccccaggccatgggaaatgatattaactgcggtatgaggctctatactacggatttaaaggaggaagaactggaatgctgcctggtgtccctgctgccccaaatccgccgtatcttttttgaaggcggacgcagtatacctatgaacggaatacagagggaagccatgctgcgacatgggcttacgggattgctggagacttcgggggaggcagaaggaaggggaatatggtccctttatgacaggggtgaacaggaaaaagccctggagtacacggcctttaagggcagcctgtatacgaccggcaccgagggcctgggggattttatcggggccgtccatactttgtcctatgatgaccagattggatccattggaggcggaaatcattttgtggagatgcagcgcgtggcggagatttacgacggccggacagccaatgcatggggaatcaggaagggaagtatactggtcatgattcattccggatctctgaccatcggccaccagagcggcagaattaaccaaatcataacaaaggagctgtatccgaaaggagttccccatccggacaacggaatttatcttttgcccgaaagggaaaaaatggaaataaatagcagagaaaatgttccggtaagcgatgagacagacagcccatggcagcgtttctgcagcactacatacaacgccgctaatttcggatttgccaaccggttattcctggggcttatgcttcagcgtgccgtgacagacaaggtacggccctatgagatgaagcttctgtacgattccccacacaactttatctggaaagaggagatggagggcaggaattatttcattcacaggaaaggggcctgctcagccagggggatggaggggatggagggaacgccctttgcctactacggggagccggtgatgatacctggttccatgggaagctccagctatctgctgagaggcatgggaaatccgcaatccctgtggagcgccagccatggagccgggcgcaggctttccaggggagaggcgatacatggaaatgaccgggaatttaaggaatttatgaaaaaattccatatcgtgacacccattgatccggaccgcagtgatttaaagggtcggaacgatatactgaaaaaatgggaggaaaccatccgctctgaggcgccctatgcctacaaggatatccaccaggtggtaaaggtccatgaggaacacgggatggcaggactggtggccaggatggagccggtgtttacggtgaaggcgtagaaggggaaaccttatcagaatatgttaggaagaaaccgctgtatgaaatggaatgaggaattgctgacggaatttttcgcgatgacacctcatataacagcggttttttttgcgggaacaggaggaaaatctggtaaacaggaatcatatggatgacaaatgtgaatgacaatgacatatgtcactcacaaaatggcaaatgacatctatctaattccggcattgtatcttataattgccacatagtgataaggaggtgttattatggcggagaggccggcagaggataagagtggtatactgccagaaacgtctatcttcttttatggaataccggcttacgggcatctgcattcaaacctttatttaacaggatgcctgtctgctgccggatacagggttgtttattattcaatggagccttacaggagagaaattgaggcaaatgactgtgagttcagggcttatcctttggaccgggattccattgatgcctctgacggggacaagccgttaaaactgtaccgtctgattctggaatacacccgcgatatgcttcctcatcttctggcagaggcagaaaaggaaaaaccataccgtgtcatatttgattctctggccctgtggggcagggctgtgggagaaatcatgaagataccttcatgcagcttttacagcattgcggtcgtggaccgtgttggagggaacgcattttgggcatatgcatccgggttctcagcctcttttctccggtatgcgggagaatttaatcgggccatggatgtccgccgcaagctaaggcaaacatatggaatcagaaagctgggtgtgctgtctgttttgatgaacaggggaagcagtaatctgatgggatattccaaagacttccagccgggcggaaacaaattgggaaatggttatgtattcctgggacccttggcgccctttagaaaggtcatccagaccaatgattttgtttgtcctgatgacaggctgatttatatttccctgggaaccgtatttaaccgggatgagggactcctgcgggagatactgcgccagtttgggcaaaaacatccggtggatggggaaccgtctaaaaatgagaacccctggaatgtagtcatggtctgggatatggaaacggccggcaggaacacagacaccaagaaggatgaatggaaacacagggataactttattatccgtcctttcgtcaaccagggtgagatactgaaacatgcggacctgtttatcacagcaggaggaatgaacagcattcatgaggcattgtactacggcgtaccctgtctgatgtgcccccagcagggagaacagctgctgaatgccggtcagtttgaagctttggggtttggacggatactgagggacagattggatttatatggggaagccatggctgcaatgaagctgaaagaccagtgggatgaaggactcagaacagaaatgtgtgctgtgcacatggaagcggcactgcaattatttgatgaaaacaaatgaaaaagccggctgaaatatatggataagaggggaaacaaagtatgggaaagaccgtggaaaacggaaaaaatacagttcttataacaggtgcaaccggatttctgggagaatatctggtaaggcgtcttacaaaggaataccgggtcctggcaatgggaaggaaccgggaacaggggaggaaacttgaagggctgggcgttgtgttctgcccgggtgattttacagaccggaacacgtgtgaggcatattttaagggagtccggtatgtgattcacgcaggcgcacgttccactgtctggggcagatgggaggatttctaccggacgaatgtggctggtaccgcccttgtggcagagctttgcctggaaaatgggattgagcgtctggtatatatatcgtctccgagcatctacacggtaaaatgcgaccgctatgatatccgcgaggaacaggcaccaaagtataatgacctgaatcattatatcaggtccaagctatcagcggaacgagtggttgaggacgtacaccaaaagggattggagactgtcatcctccgcccgagggggctgattggggttggggatacaagtcttgtgccccggctgctgcgggccaatatgcggattggaattccgcttatgagggagggccttaatacggtagaccttaccagcgtggaaaatgtggctcaggcctgccagttagcgctgacagcccgggcggctgatggcatggcgtttaatattaccaacggcgagccgatggaattcaagacattgctggagcattttcttgcagctatcggagagaagccccattacagaaaactgccctttggagctgtctatggcatggctgcggccatggaatgggtatacaggagcctccatcttccgggagaaccggcacttacaagatatacagtgtgtaccctgggattttcccaaaccatggatatcagcagagccagaaccatattgggctatgagccggaaaagacattgatggaatccatagaggaatatggaaaatggtggaaaaacagggacgagccggttccggatcgtatcaccagggtaaagatgtatcactgcggctcctgtaccaatgacctgggtctcctgtttaagaggcatcccggccaaaagagggagtttccggccagagcgtttctgatacagcaccgtgacctgggcaatatattgtatgatacaggttattcacaggctgtgtatgaagatggatttcttctaaagctgtaccgccggctgaatccggtccatgtgaagcctgatcagatcattgatgagaaattgagggcagacggcataaatcctgagagcgtccggaccatcattctgtcccatgcacatccggatcatatgggagggcttaaacatttccacgggtatcatctggtggcaacagaacaggtacacaaggcgcttctgagaccctctgtgaggaatctggtgtttgcgaatatgcttccgaataggtctgcgcatatgcatcccaagcgttggggcatgttttccggtacgcccagggaggcagtatcagagcttcctcaggatatgatgacagatattccatcgggaaaatgctgtgaagtaatggggcgaacgcccaaaaaacggctgtcagaacactttttatgcagatattttgaacaggtgtatgacctgttgggagacgggagcatcataggtgtggtgctggacggacactgcagggggcagatggggatatggattcctgattttaagctgcttttggcagcagacgccagctggggcggcgatttggtccgccatacgcttgaaatgaggctgtttccgcgtctgatacagaatgactttacggaatataagaaaacattaaaaaagctttgtgagcttcacagggaccatccgcagataaggattgtgtttacccatgaaaaaggaagcgaggaaacatatggctgatacgttatctgttctcaaatactatctttactacaaatacaaaaagcggttttcagacagaagcgccctggaacggtggcaggtacaaaaaatcaggaagcatctggagtatgtgggggagcattcccggctttacaagggaatgaaaaaactgtcctcttatccggttatagacaagaagtttatgatggaacattttgatgaactgaacacagttggaattggcagggaggaggccctggaatttgcggtcctggcagagcgccaacggaatttctcacctaagcttaagggggtaacagtagggctcagttccggcacatcgggaaaacaggggatctttctggtatcggatgatgagaaaaaccgttgggccggatatattcttgcaaggttcctgccgggaagtctgtttgagacgtattccatagcatttttcatgagggcggacagtaatttataccaggcagtgaagtccaaaaacatacagttccatttctttgatatttacaaggatatggaggaacacagaaaacggctggaagaaatccgtccccggatactggcaggacagccgtcgctccttcttatgattgcagaggatgtaaggaaggggaaaacggatatttgtccccggattgtcatatccattgccgaggtgctggaacaggcggatgaacagaggataaaggaggcgtttggcctttctgttattcatcaggtctaccagtgcaccgaaggatgcctggcagccacctgttccatgggaacgccgcacttgaatgaagatatagtgtacattgagcgggagtatctggatgaccggcggttcgtgccggtggtgacggatttagagagaaaggcccagcccatcatccgttaccgtctgaatgacatattggtggagcgaaaggaaccctgcggctgcggcagccccttcctggctctggagaagatagaggggcgcgaggatgatgtgttttcctttaaagggaaggacggaaggaatgtgcctgtgttcccggattttatcaggagatgcatcctgtttggggataagggcagcggtgaaaaccaggcagggtcttccggagattacaggattgtacaggagacggatgggcgtctgactgtatatgcggacatggcagaccctggtaaacagagggttttaaaggagtttgaactgctctcaaaagactgcggcttcctgctgccggatatatccttccggccgtatagttgtgaaaagggaaggaaaatgaagcgtgtggagcgcagaggtgcagagccggtgaagggaaggtacatatgagggaacgcaaggtgaaaattgccggctggggaaacaccctgtcgggaaagaaaatagagtttgatggccagacccggtaccgtctggataaagatgaaaccttactaatgcttgcggtcaggtctgcccgaaaagcattggaccgcgcagccatggatatcagtgatatggactgcattgtatgcgccatggcaaccccgctgcaggccattccctgcaacgctgccctggtgcatgagcagctggccaagggactggacataccggctatggatattaataccacctgcaccagctttatatcggcattggatgtgatgtcatgcctgattgaaatggagcggtataagaatgtgctgatcatatcaggcgacactgcgtccgcggccctgaatccaaggcagaaggagagctatgagctgttttcagacggcgccagcgcctgtgttttgacgagagctggggaacaggagtcatcgaaaattctctacagctgccagaaaacctggtcggaaggcgcccatgatacggaaatcaggggaggtggaggcatgatgccggcattttccatgaatgatgaaaaccgcgaggatttttacttcgatatgaaaggcaaacgtatcctgaagctttctgcccagaatctgcccggatttgtggagcagtgtctgaaggaggcgggggtaaagcgggagagcattgacctggtggttccccaccaggccagccgggcgctggatgttattatgcccaggctgggcttcaggaaaggaacctatatagaccgtgtgtcacaatatggaaatatgatttcggcctcagtaccctacgctctctgtgaagccattgaggagggacgggtggggaagggagacctggtgctgctcatcggtacggcggccggtctgacggcaaattttcttttgatgcggatttaatggggatgtctgaaggtgttcatttccaagccggaacctgtaaatctatattgccagatccagatatgccccgtatccttcctcctccatcctgctgcggggaatgaagcggagggcagcgctgttgatgcagtagcgcagtccgccggtcccggcaggaccgtcttcaaacacatggcccaagtgggaatcaccctcgcggctgcgcacctccacgcggtgcatgccatgactgctgtccggaagctccgtgacggcgcaggacatgaccggctttgtaaagctgggccatccgcagccggaatcaaatttgtgggcagaggtaaaaagaggctctcctgtaacgatatccacatatagacctggttcgtgatgattccaatatggtcctgaaaagggcctttcggtggaggcattctgggtcacgtcatattgctccctggtcagctgtttctgaagctctgcccgatcctgctttatgcccgttctgccgtccggacggacaatgaggtccttgagactgctgaaatcaatatggcagtaaccgtggggatgattttgcagatagttctggtggtaatcctcagccggatagaaattcctcaatggttctaactccacagccaggggctggctgcagtccttctggatttcaaacatgacagactggatggggccgagatcctcatcgctgatatagtagataccggtccggtactggcttccgcggtcatttccctgacggtttatgctgacagggtcaataattttaaaaaactgtctgaccagtatgcgaagtgcaacaatgtccggattatacaaaatacagactgtttcagcaaaaccagtggtgtctgagcagacctcctcgtatgttggattttccacggctccgttggcatagccgcactccgtatcgcagactcccggtatacgggaaaaatattcttccaccccccagaagcatcctcctgcaaaatatattttctgcatgatcctatcacatccttttctatgttttttctgaattgaatccatgattctattatgccctggtaaaggactaaaatcaatgaataatgaatgcggcaatcaaaaggagtgccgtctgcggcagagagagctgtttaatttgttgcagactgtaaaattctggtgtaaaatcatattatacagacggttaatacaggtctttgggctggaggttctatttatggaaatgttggttttcggaattgccgcagcagtatcctattggtatgaaacagaggtttttttgtttttgggcagcgcgtacgttacgtgcaggtttttgtataaatggtatatgccgctgcttgagacctggccgcctgaacatggggagacggggcgccgggttttgggctgtctgccccctgtttccttggccatcatactttttgttctactgaccatggcatcctatgacgtggttggaatttgggttgttttttatattcttatgggatatgcgtggatatgcggcggggttttcatgatggaatgcctggatttatcctggccctttgacgccgtccacctggataataaggctgcggtttttccggcagccgggggatttgtgggagtgactcttatttacgcgggagccaacacaggggatggacccggctggtgggttgtcctatttgccgcaggactggggttaattacctggcttggactggcgctggtgataaatctcttgactgatatatccgagcgggtcagcgtggatcgtgacatgggcagcggcatccgtttcggtgcttatctgattgccagcagcctgatactggcttatgcgtcgggcggggactggacctccacccaagccacgctcatggagttctccgttggatggcctgtgcttccccttatgctgttttctcttgcggtggagtggttttacatacgtccgtcccgttcccttgcggacaaccgtctgcaggcaaatatacttccgtcagttctttggggggttatttacctggtctatgccggtattgtgcttttgatttttcatgggattccggaacgtatttccggcggggtactcctgtgagcggggcggtgcttgcccgaattcccggtgaacggtattcggattaccgttatgaggcaatttttagggcatacaaatgggatcctcaggtggaggaccacaacacagtggctgagcatgtggtgcttctggacagccagacagccagacaactggaacaatgggcggaacagctgtccgctgagactatggagattgagcaggctatgatggaacggagcgatttggtaaaaaaactgggcctgccgtctaaggtaaagaaggcaattcccagaatgggcagttattccccggaaagacatgttaggctcatgcgctttgactttcatcccaccacagatggctggtcagtatcagaggtcaacagcgatgttccaggaggtctggcggaagcgtctgtactcccgagaatcgcgcagccgtattttccgcagtatgaaccacaaggccatgtggcccgcagtttgttggaggcattccaaaagagaaccggtcccggcgtaaggattgcttttgtacatgctacctcatatgcggatgaccgccaggtcatgcagtttttaggggactattttgaagaaaatggataccgttccctgtatgcggcccctgaccatcttatctggagggagcagcaggcggtaagcctgattcagggggaagaaggccctgtaggcggaattgtgcggttttatcccctggaatggctccccaatctttccggacgaacggactggggcggttattatgatacacagacaccatcctgcaaccatccaatcgcagtttttgcccagtccaagcgtctgccgcttatatgggatgagctggggcttgaactgcctgcatggagggcattgcttcctgagacccgcgctccggaggccggtaaatttggggatgggtggatttacaaacccgccctgggccgtgtgggggaggggatttccattcgggaggcactgactccaaaggaatacaggcagattcagagaaatgtccgctggcacccaaaagactggattgtacagaaacggtttgaaagcaaaccggtttctggcgatgagggggaacattttcatctctgtgtgggagtgtttacagtagatggcaaagctgccggtttttatgggcgcatcagtccctttccccgcatagatgccagggcaaaggatattcccctattggtggagaaggaggataaacccaatgaatgacaattacaatacataccgaatctgggcgccggacaatgctctgtggactcagtgggccaagccggtgctgtttgcccggacgctccagcaggttccggaaaagctggttctgcctgccgttaaatgggccccttatggggacggcagaacggctctgtttgtggatttgcctggaaagagaggcgtactggagggacttgccctggctcaaatgggttaccgtcctgtacctctttataacggtgtctacggcgccgataagtggtccatggccgtggatgtaacatctgtggcggaaacgttgtatcaaggtgcagattaccttagctgccagcatattcgtccggatgcgccgcctgcatttcttctggatgcggccagaatgaaaggtacggcccgacagccgggaagatatgataaccgctggtgcgtctttccgcaggacgccccctcggctgattttctgaaggcccagggtatcgaatccatttatgtaagaaccaaagagatacagaatgatttagcccatatacttctgcgctatcaaaagaaggggattcggatttatcaggtcagggataatggcgtgccgaaaaagctgactgtagtgaggccttcccattttaaaagttttctgtaccgcttttgcacattgctgggactgaccaggaatgcagcggggggattcggcggaatggtgcccgaggccacccagtcctcaggaacccggtattatggtattggctaggaagcggcggaagaatgcgaaatcgtcctattgccttgaagatgtctgccaggaaatagggcgatttgttaaaagaaatgctattatttttcatacgttaccagctggctcagggcaattctctgccggtcaaagcggctggtatcagcagttccggcattggaatatccaattgccagaatattgattggttcaagatgttccggcagttcaaactccctgcacaaaatgtccggattaaaatagcatacccaaacgcttcccaggcccagttccgtggcctgcagcatcatatggtctgtcagaatagaggcgtcaatgtcgccggtctgttttttgtcaaagggacgaacccatgccttctcatggtctgcgcagacaatgatggccaggggagctccgtagatgttagcagcctttccgatttttgcaaggctttgctcactttgggcgacaatcagacggatcggctgcagattggcagcagtgggggcaacacgggcggcttccagaattttctccagcttttctggttctacatgctgactggtataactgcgcacagaaaaacgctgcttggcgatactgagaaactccataatattaaattcctttctgatttttattatggcatcaaatcaaccattgattttacaaccattgactttattttatcatctgtcatataattcacaagaatgcacttttaaggtagatacttcccaaaaccatagtatccccgtaagcaatagcaggacaaacaggaggaaatcatgacacagcaggaaagaagcatgttcaactgtccggtggaggcgaccttatccttgattggcggaaaatacaaaccaattattctctggcatctgataaaagagccgcttcactatatggagttacagcggctcattcccgacgcaacacctaaaatgctttcccagcagcttcgcggcctggaaacatcgggtatgatttccagagaagttataccggagaaaccgcccaggactatctattccctgaccgaattcggcaaaagcattattccggtgctggatgtgatgtgtacctggggaacggattatttaaacgggctgaatgtgaaaacaccttgtcagaagcaggagaggggatgagtggagggaaagactcatagcatttttatgttagttagattatttggtttacgtaaaaatattatgtaaacacaaagcgtgtgagaaaatattaagtggatacaaggtatcccgaaagaacactaaatcccttgtgcatttaactgcacaggggatttttaataaataataaatattatagccacgatagcctctctgataaatattgaccaaaacagcggcttcccataatgcatattatcaataggactgttccaaaataacctgtttttttatttttatcatacaataatctcacactttttcgcataccgacaaaataagttgtaattttttaatcctgggggattataaatttagttttattgtcgaaatatattatagttatgcgcacaggtatccgcatttatctatataggagttatttgttttggttgataatatgcattatcagaaacaaatatcatactatctgataaatcacgaacagaatatgtacaaataaggaaagggagcaaaaatgaagaatttaaagattggtccaaaactgatactatgttttatgctggttacatgtctgtccagtatatctggtatattgggggcattttttttgcactggtcagatcagaactacagcaaagctcttgtgaaaaatgggtttagccaaggagatatcggctcatttgatacatacctcaataaaggctctgctgttgtgagggatattgtgcttcttactgaggagaaggagatacagaattcccgcagcgagctggaacagattgaccagaaaatgcagcagtccctggatgctctgaagataaattgccagacgccggaagaacagtcgctgattgctgttattgaccaggaactgcccaggtatatggaaatccgatcccaggtggtggaaatgggacttaaaaaccataatgatgaggcgttggacatattcaggaaccaggcaagaccgattcttaataatgctatgaacgcagcccaaaagctggcggaccttaacaaacagatgggaaatgaaatatccaggtcccttacggataacagcaggcttattatatatatgattgtctttgttattataatttcagtgagtatatccgtggcaatgtccttctgggttgcgcggcttatatccaggccgattctgaacgtaagggatgccgcgttcaagcttgcccagggagatttagatatatccatctccaacgattccaatgatgaggtgggagagatgacacgctcattttccgaggctgccgggatgatgcggcgctacatcacagatatatccagaggactgagcgaaatatcccatggtaattttaatatttctcctaatgaaaagtacaaaggggcatttataacaattgaagagtcattgtttacgataatccattcccttagcaatactatgggagaaatcaacgaggcggccgagcaggtatcctccggttcggagcaggtatccatcggggcacagtctttgtcacaaggctctacggaacaggccagctccattgaagaagtggcggctactgtaaacgaaattgcatcccgtattaagcggaacgcagagaatgctctgagcgccaatgagaaggctgtggaaatgggccgccggataacggaaagcaaccgccagatgcaggacatgatacacgccatggatgaaatcagcagttcttccaaagaaataggaaagattattaagaccattgaagatattgccttccagaccaatatattggcattaaacgctgccgtggaggctgccagagccggggaggcagggaagggctttgccgtggtagctgatgaggtgaggagtcttgcaagcaaatcagcagatgcatcaaacagtacgtcagcccttattgaaaactccctgcgcgctgttcttaatggtacaagaatagctgatgatactgctaagaacctttcggacgtggtttcaggtgtaaaggatgtggtagccaccattggacagatatccaatgattccacagaacaggcagatgccatcggacaggtcactcagggaattgaccaggtttccagtgtcgtacagacgaacagcgccactgcggaagaaagcgctgcggccagtgaggaactgtcagggcaggctcagctgctaaagaaactgattagtcaattccgccttatcacggttcagtaagagattaacggtaaaggactcatagcaggcaatgagtcctgtgcggtaatgtgaaacaactggctgccgagaagggaagattagtcctgcctgctgcaaaacgcccccattggaaacaatgggggtgtcagaatgatgatatcataaaccctgtaaccggattatcacatacctcttattaaaaacacctctgtctcgtatctaccattggcaaccgcctcttcgtgggtttcataatagatgtccacaacatttcctttgatggaagccccagtatcttccactaaataaataatctctccaatccgaatcctgctgcccaatggaaacacatctggatcagcagcaaccgtatattctggcctgggagcggtccctgatttggtaaaatggttttccccggtacacaattcacagctacaataaccagtgatttcaaacatgccgcaggattcttccccggcggctccctgggaactggcctgtaagggaacgtccgtatctgcctgtttttcctgcgctgctttgtttatccggtcatccttgatatcctggagcccctctgtttccagcccgccctccccagaaattgtatcctgaatcacaattattcctggtgcctcaactgtattgcttccatccgctgtctgtacctctatgtctcctttaaggggcagagcataagaatcaaaaaaatccaccttcagcagtaacaccgccgtaaaaaacaggacagataagaaaattcttctgcacaacttgcaatcccccctttgttattataaattatatatcggctgttcagcagaaattctaagctaaaacaggacagaaggcgtttttttctcatgtaggcttagtaaaatatatccgtgtttgggtttatgagcctcagatagataagagggaaggggagtagatcctcaccattataacgcatgatatcaatttctaaagaagcggttgaatataacacaaagcagacaaccaaggataagagtcagcaggaaaatggcacacaaaagcaacggaacgatattggccgtattttcagcagtatggcaaatgtttgcattatcaatgaacgtatccagagattctgactgtatcaaattcccactcataatcattaagtaagtactgtaagccagagacttcattgtcagaaggtctgacctcagaaggagtggcaacagacataaaacatcacatcctttattcaattttaaacaatgggagttatcaagaattgatatattgatatatagaaagaacaaggaacctcacccctgctaactattcgttaaactagactttcgcgaatagttggaaaggccgttctatccgggcctaactatacctgagtttaaatatagatttcattttcgcgcaattttcagacatgttgaaaccatctctttcatccaaactgttttaatattcctgctccggatgatagaattttttcatgtgattatacatcgggtcaacgacaccaaatatgggaagctgtatatcggatacggactggtccacaatgtagccgtttatgacataccagtgatgatatgcactgcccttctggtctgaacctgtagggtaaatgatttctgcgttcactgtatgccccgtatattcgttgagacgggccagaacctgcttcgcggtttcctccagggcatctgctttcccggcatactcagcttgctccatatcctccaaataaaaatccagagaaacgcttagataccagaggtccggcttccttttgaagataccggcataatcaatatcatacaaacaaaaatctgattctggattttcccaatccatgctgctgtcagattcatccaacaggggcgatgtcttaagcgctacctctgccctgggacttatgtctgcagcagggtccttatacggcctgtctgttatatggtctccgctgacataataattgagaaatctaatccagtactcaggctgccaacagacagcgggaataacagggctgattacatccctggcatatacctctcctgtcatggtctggaaattcttttctatgcagtatccgaatgggtgttccatactcctgtccttaaagttactgagcagtatggagcgctcctgtccgtccttatccttataaccgatttcccatgtataaatgttagtggaatcaaagggcgtgaccgtatagccgctctctttcgccagcaccatccacccctctcccagcagccgattcaggtcatcatggtatacctttgtataatccgtggttatattattttcaaggtgatcaatcatctgattggccagcaaaagtcctgatatcatgacaataaggatgaccgccgccaggattcctgtgctctttttcaatggcttcattgtctccccctttatctggtgtagctgaaatacagaaaaattgctgtggttacctgtttacagaaaaacatgagcagcagatccagtccaagaatgatcagactgttggccgttgacagtccgccgtcctctgccagcatcttttttaactccgggttctcttcctctgccctgtcgttacacccatgaaaatcgagaacttccctggtgtgtttccagaacatccggtccgctatttttcccaaaggatagaattccaacgccagcataataaggaggaacagaaatacatagccggtatcataaggcagagaacggcttcccttgtgcatccatccataagcggcagccatcagaggaactgctgtcatattgaggacaatgagccacagggaaatgtcaaacatgcctcttttggcaaaccaaaggtttcctccaaatccggcggaagggttaaactccggcttgttctgggcttttctgaaccgttccagtgtatcttcttcggtatgaaccagacagtcccggatatcggataccaggtaaccgtctaaccgcattttattatcttccggactgttaacgcgcttgggcacgattttgaatctatatttacagtaagggcattgtatgctgtcctgttccaactctttctggcaaatggggcattttatttttttcatttatgaccagcctttcccgccaaaagctttgtggtgcctggcgctgactgcaagtttcagtgaggggttcagtcaaaagctatctgtctctattttatcacatctcacctggataagccagaaaaaggaagccgcgcgcagtgcttctatagatatattggagtgtttgtgatatagtgaaattatcagaaaatgataaaggagaatgataatggataatcgtgaagtgatatgttattgcgcgggtgtcacaaaggcacagattctggaagctctggataacggtgcccggaacctggacgatataaaacaaatgacaggggcatgcactattggcagatgtaaagaattaagtcccacagggaaatgatgttcctctgcgattataggtataatcagggaatacaataatatcttttcaatccagtccaatcatatataccaatcatagggtcccatattccttacatctgccggcaaagggcttctggattctggaggttttatgcacaccctccagaatccggaagcccaaactctgtcaaataatttccaaaagcttcagtatttcattgtgaggcttgtcagcatccgcctgaaatacatcaatgtgattcagatccccgcttctgtccgtaaaggcagggaataaaaagccgcatacgggtttatccggctcatactccccgctcagggggcagaccgcgcaaatcatatattcaaatacctcctctgattcccactggcgttccttgtcagaaccttttgccgggatatcataacggtcatggaaaaccaggatggcatactccctctctgcacggtaatgctccataataacatcataaaatgtatccatcagggcatcatttttcaggccgcattcattcatggccatgagaagctgccacatacttcctggtttccgcgcaccttgaggatattcgtactttttcaggttcacattcgtggctgcaaaggggatttccttagccagcttcagtttctttgtccgttctgatgccgataatttaagaaaattaatattaaaactcccatcaaaatccccatccctgtcaacataacatcctgcaattctggtaaaggaggtgcgggaaagggtcatccgtcttgtaagctccagcatgtcttctctgtttatcataatctgtccgttgccttcctgtcttttctgtcattcataaacagattgtaccatatacttcatggtccaacaacatattaaaattgtattcagttaaattatatacaggcaggtgcgccatatggcgaatgaaatgataaaagaaacagagcaggtaatagaccaggaaattgtcatggcattgtctattgaccgtgtcatgggccttctgctgattggagtgaccatgttaatcatttttcgggctgtattgatagccaggaaggcttctcccctccatccgcagaagagccatccccagaactgccaatagtgattgggtaatgggaacagacagccatacgccctctagcttcatgacaggaggcagtccaagggtcagaaggaagaataaaagtactggttcaccatagaccaaaaggtaggaaaacaagttctgttttgttgcataaaagtaggatgtggtggtcctgcaaaaggcaataaagaggaaaccggcagtaaaaaccggcatactttcagccacaatcgggaatgcagcggaggatgcgccgaaaaagccggaaacagcactcctcaaaaggcagagaattcccatattggccagagcagtaacggcggcaaacaaatatgccatgttccgcacggttctggcctgctttggttttccgattccaaggtaaaagctcatgagaggctggcttccatctccgattccctgtaaaagcagctgtacgatggctaccacataggatatcactgcataggcggccaccgcagcctcacctccatatacatatgcgctccggttaatcagcatgattacaataaagggggagattgtaaggccgaatggcgatacgcctgtaccggcaatcctgagcatctgctttttctttaataaaaagtgttctttccggattccttttattctggatcccatgaataaaatacaagggaccactgtaaccccctgccctatgacggtggcggccgcggcgcccgccacacccttgtggtatacagctacaaacaggaagtccagcaggatgttggtcaaaaatcctccaatcatggatcccatggctgtcactgccccttcataatttcgaatcagtggtgcaaagccggttgcaaagagctgaagcagggaacctccaatcagaatacggatatataccatggcttctccgtacacgctgccctctgcccctgacagtctgaggaccgggccgcataatgcaaacaggacagccataagcaaaagccctcccaaaaacagggtggtaagagtatttcccaggcactcttcctccctctcccggtctccttttccacggtaaagggatatccagacagcgcctcccatgccgatacccgttcccacagcctgaaccagggcagccagaggataggcaatattcacggcggcaagtccaatgtctcctatgtttctcccaataaaaaagccatccacaatcgtgtaaagtcctgaaaaggcaaatgcaagcatggacggaagtactgctcctataaaacgtcttaacatgacaaacctcccattatttgatacaatgagaatagtataaaccttaaagctgcttgaaagtcaatctgtttttaataaggtcccctgtatagaatggaaattgatagggacttttaataaggaggaataccttgaaacacatcagccgtataaaggaagtgtcagaactgttccatttgccggcttcggccctgcgttactgggatgacgagggattgattcgctttgaaaggtcaaaggacaaccattaccgctgtcccacttcccaaaccatgctggatatatgtgatgtgattttttaccgcagcctgtctctgtccatcaaggagataaagtccattcctggcatgtgcgtagaggatgtggaccacaccctggagacaaacgcaagacggctggaggaccaaatcaggcagatgcagatgacgcttgaaaagcttcaaacacggcgctccatggtccagcgtattatggacctggagcggacttcgtttcaggtcctgagggaccttctccctgccatgaaactgttttctcctgaggacagggaatccctggagacctatgtacaagatccataccagtcctccattctgattaaaccacaacaaggccaggagatacagtatggtatcttcctggcctgcccggattatgatttgggaaacagtgtcatcctgcgggaccaggacgccgaatccaggctgtatctgaaggggcttctcaaggtaaatgcccaatccccggactgcaataacgcaggagcattcctggaagccgcccagtccatgggatatggctcaggacaactgacaggccgttatctgctaactgcctgtgacgggtaccgctgcgattattacgaagcctggcttgagatatgggacaatggataatgagttgtcagctgacaattttcagatataccctggatgtgagtatggtcaggttcatggctgacagcagatttgtgacaaacaggacaaatatccgtatcctcccacccatacacccgtaatcgtattatcttcggtatccagattaacgtatattctggaaatgctgtttagattatgcccctgttcaaagatatactggtcctgttttgacacgtacctgtataaatagcaggccaaggcacagttggaggtgccggttgcggattcctcatctatgccgtaaagcggggcaaaatttctgcatatggcagtcagacccatctcctttgccagggaaaacgcatggatgccgatgcattctttctcacggcttagtctggtgatggcggaaaaatcaggcgtcatccggcccagaatctcagggtccgttaccggaagtataatatcttttaatcctgtggacacgatttgcacaggtaaggcatccgggataccgtcagaatcaaagcatgccttcacatcccctttatccagtctttcatagaactccgggatattctgctccatgaatatcagaccgcttttatccacacgtattctcaatataccggattttgtctcaatggtatactcctgtttttcaagccgccctaaatgccgcagcacagtaaaagtcccgattgtggcgtgaccgcacagaggaacttcgcccacagaggtaaagtattctaatttaaaatcagccagctctgaatcagcgacaaaggcggtctctgaatatcccatgagaagggcgatttctgttttttctgcttcattcaggcgggcctgctgcaataccacacccgccttgtttccgcctctgttatctttgctgaacgcatttgccacataaacatccattatcattctcctatgcggaacataatcctgttcctaaactcctgcgccttgccgtcattccaatcatggacaggtctgtaatagcccgcaatcctgctgtaaacatccgcagcgccattgcatttcggacacctctcctgtctgccgggcagatagccgcaggtctggcagatggtataaacaggagacagtgtgaaacagggaatatggtgttctgtaatcatactgctgagcagatcccgtgcctttttccagtcctccagttcccgctccatatacacatggaatacagtgcctgtggtataaagaggctgcagggaatcctggtttatgagtgcaccctgcaatgtgccgtcataatccgccggcagtttggtgctgtttgtataatagggggtgtccccttcgtgtccggctgtccggatcccggaaaaacgctcacggtccagcctggcgaaacggaaggtagctgactctgcgggcgttgcttccaggccgtagagattaccgtactccatctggtatccaatcagcttttcacgcatatggttcaggacagagacagcaaacttctttgtctcctctgattccaggccggctttcagccactgcgcattgagccctgcttcattcatgccgatgacgccgatggatgaaaagtggttgtcaaaatcagtgaggtaacaggccgtatagggataaagaccattctttaacagggtggagatcacattccgcttaatgctcagggaacgggcagccaggtccatcatctggtccagccgggcataaaactctttctcgtcctttgactggtacgcaatccggggaagattgaccgtgaccacgccaacggaacctgtatgttccccataaccgaaaaagccgccagcctttttccgcagcacatggaaatccggccggattccatcataagaagtccttacatcttccggtttcatgccatttcccatataattgatgaaatatggggttccgtaatgggatgccagggaaaacaatagccggttttgttcgttgtcagaccagtcataatctgctcctatcccataagccggaataggatactgaaatcccaggccattggcatcgccttccagcatggtttccagaaacgccctgtttaccatgtccatttccttctggcagtctccgtaagtaaattccattctcctgccgcccacaatggccttttcgtcagccatgtcccctggaaccttcaggtccatgaaaatgtgggaaaatggggcctgggtaccccagcggctgggagtgttgactccaaagacaaacgcctccatgcatttcttaaccttatcataggacaggttgtctgccttcacaaagggagccaggtaggtatcaaaggaggaaaatgactgggaggcagcccactcattctgcataattcccagaaagtttaccatctggttgcagagggtggccaggtgcttggccggagatgcggtaatcttcccggtgatgccgcccaggccgtctaacagaagttttctgagggaccatccgcagctgtagcttgtcagcatggataaatcgtggatatggatgtccccgtttacatgggcatcggaaatctcccggtcatagacttctgtaagccagtaattggcagtcactgcgccggaattgttcagaatcagaccgcccacagaatatgtgatggttgaattttccttgacgcgccagtcctccacctttacatagttatccaccacatccttgtagtccaggatggtcttatccaaattcctgattttctcccgctgtttccggtatagtatgtaggccttggccacatcagtgtagccggattcctccaggactttctccacgctgtcctgtatatcctccacgctaatccggctgtcttttatcttcatctggaagtcagatgtgacccggagcgacaatagctcgataatatcagccgtatatgatttacctgttgctttaaaggccttcttgatagccagcgttatcttatccaattggaattccacggtttccccgtcccttttagccactaaaagcatgttcttgtctcctccttgttaggcgtgattcactgtcggtataagcagatttattatattatatcaaagacatgggcataaatacagcatcatttcaccagaatacgctgtccttccatccggcgtttattggatgccgtcaatggcctgtatcacctcttccagggaaagccatttatcccattcataccccggcttctctggggatgtgtcatagacagcccggaatgcctgattgtattcctcctgcgtcatcatgacaccttcccattcatattgatagatggggttcccctcctcatcaaactgcacatgggagttatcctcagccccataatatccggaagcaatgggaagcagccggcccgattccatactgtacacaatatcgtagtagtaatccatatttccctcagagttgcacagaagatttccgcgttcaatataagagaaatagagtctggacagctgcgtttcataggcagccccgtctgcaaaactgactatcctgcagcccgttgcctcgtcgatgccgatttccaccaattcggggatgtcgtcgtcattgatgtaaattaaattatacccctgccactgaccgctgtcctgggattggagaaggccggtataggcctgctgccagccggaggcagatacactgggcctgcctttgcccgcgcccagaaatcccaggacagactgtacggtcttttcggcaagggccgagttggcgttttccgacagacttctctccagggtaaagctgccgtcagcctttccgctgtagattctcacctcaggatatcctgtgcctgtctttggcccggaggccggtgagtagctgcatatgatgatgatatcattgaaaccatcgctgttatagtcgggaaaggatactgcctccaccttgttaaacgtctcgttacttcgtgtgttgccctcatacacgccgtccagaaggcaaactgtttttttctccttctttatctcaaacataacatctgcaagaggattttgaaggctgtccggtttataggacgcaaatgtgacgctgcccaatggctccagggtcacatcaaacgtctggtctttaatcagcagatatccggcctccccctgggctgaatcagccggtgcagcggtgctgcctatgggatgctccgatgactgctcagactgggagccctcttgggtgtcaatcctgatttccggttcggcctcagtgctttgggattctgcctgttccggggacagcgcatgggatggttccttgtgcccgcaggcagtcaatacgccgcacagcgccatgcagagtaaaggtgctgtcagtttttttgaaatatgattttttgaaatatgtttgttagtgatatacttcatatttagttaccctcgttttcatatgtgctttggtttttaagatacagtcaatatacagtcaatatacagttaatatacagttaatatagttcagtcaatccagtgttttctgtcccgctacaagtaagagcttgtcctggtcatgtctgtcaccaaatccgggttatcctgcttcatacgttccagcagaagttcaatgttcgctgtttttccctgaatgttcttaaattcctgttccgtaatacctaccagctggataaactccgtctttccatagacagaatcctgagacaccgcctctgtgtccatggtggttatcagtgccgtgatagctgaatccgtccctacatgaagggatgtgccgttacctgctatatactggctggggagaaaaaactgattttgggtataggtgtagcgggcaagatttgagagcatatcaattgcccagagacaatcttccggctccttttccctaagcttgatggtcatctcataaccccacttattccattctccgccaaaggactcctcatctgcataaagctccgtcattccaaatgtcacaatatgcttatatcccttgggagaatcatagatggaatagccgtccaggtagcagtcgccgccaaatatggccctggccatcatgtttgtgccatagtgccggggctcctgtcccgggtagagccgctcaaattcctgttcaatggtttcccagcccggcgcccattcttcgttttcttttacgcgttttaaaaattcttcttttgtcatttgatttcctcacatgagtttttatataaccgtggatgcaaaatatatcatcaggaatatatcatccgcggattctatgaattgcaggaaggaccgcaatgtgatacaataccacacgggacgtttgacggaccgtttaaaggggaccgtatatgtaaaaaaatgtatgtattggaggctttgtttttatgaaaaagtgggaaacgatcagggagttcatcatgattacctttgccaccgtcattgtggcggcagctgtctttttcttcctgatgccaagccatgtatcggtgggaagtatatccggtctggcaattgttctgggaaactttgttccccttaagatttcagcaatcacctttatcctcaatatgctccttctggttctgggcttcctgctcatcggaagggaattcggggcaaagactgtttacacctcgttcctgctgcctgtggtcctggctgtttttgagacggcatttccggaaaatgcttccatcactaacgatgcgtttctggatatgatatgctatatctttgtggtaagcatcggactggccatgctgtttaacaggaatgcgtcatcaggcggcctggatatcgtggcaaagcttttgaacaaatacctgcatatggaacttggccgggccatgtccatgtcaggcatgtgtgtggcactgtccgcggccctggtctatgacaagaaaattgtggtgctcagtgtccttggcacctatctcaacggaatcgtcctggaccatttcatctttggctttaacataaaaaagagggtgtgcatcatttcccagcgggaggaagaaatcagggagtttatcctgcatcatctccacagcggcgccacgatttatgaagccatcggagcctatgacggccagccaaggagggagatcatcaccattgttgataaaaacgagtatgtaaccctgatgaattatgtgctgaaaacagataaggatgcttttgtcaccgtgtatacggtaaatgaaatcatttacaggcccaagcattaactgcagcccggacatggttttatttccatttccatcttctgtctgatgttgcccgcattctcatgttgcaaaggacctttcactgctctacctggcggaaatcagatactttacaatataatggtatgcacccactgtaaaagcaggtatgaggattatgtaagacagaatattgagcatggtaaaattatagacattggatgcttctccatattcaagaacatatctgcacaccatgcccaaaatggtcataaggagggtcagaggatagacagccctctcttttgccttcccgtaaaggcctgcaaatccccaacctatgattccgtaagagcaaatcagcagataagctttggtgaaatccaggggaaagggatggcttcttatgggaaatgtaaaacagcctgcaaaggcaatataaaataaaagcagaccctttaccatgacaggatggcgcataagaaaatgatttatggattgggccgtcctgtttccgtttgtccggttttctgcatttggtttttttgccgccctgttctccgccattctgcgccctgacaaaaaacacaggatgcttatgattaaaattacgatgatgaaagataggatactgaccatacacgtcctcctcccctgctgctggttaccatgacagaactgaatgacagacagcatcacggcgcccatgaaagaaggcgttccactgcactggcagacatataatagcattcattgatacttctcatatcgttggcaatattatagacaaagggggctgtccagatgactgctgtctcctccttttgataacacgatataaacacatccatgccttccttcctgtaaactgacagtaccgcgtcagggggatctggcggcggttcccggtccggaagaaaggtccagttcctgccggtcatatcagcaaataactggtccatcaccggattggaggtggtgtaaaaatgattccggtttttaaactgtacttccactgtgtccccggacgggcgtgaaatgcaaagcaggggaataccttctgccgccatccagtttttttgcgacatgtattcaatggtttcccgcccgttccattttcccgttacattccatgaatctgtaaagaaggaatcgtcatggtccagagtaaccggacgttccggggtgctgtatgccaggcgcccctgatcggtgcttaccagcaaaagactgctctttatgtagccctctgccgtatccatgaatgctgcaagggcgtccggatctccgaaaaagcctgtcctgtcctcctgctggagtgcgaaatctgctgtgtgggagtgcgcttccactgtttttttatccggacctatgtaaaagatacgaatgctgtatgcgccatatccctggttcatataaggtgaatattccatgagataatccgccccgttttctctgtagagatacagcatggtccagcctgcatgggccacactgtagtcatgctcccagatgaccggggaatcagccgattctcccgccaataccttaagggaggcatattgtcctcctgatgcctggaaatcagccagtccggcagtgatgcgctccggttctccatcatggtccagatctgcaaagaatataacgtccgcgtccgttccgtattccatggggcagagggttccggcgtccgtcagcagctccggttttactgtgatttcaggcagtgattctgacgctgtttccggcgccggcgcctcggacaggtattccatgccttccggcagggcaggttcacgcgccatgctgctggctgcagtgggagatattgtgccgccgcatccgcagaggagaacagtcacagcaagtattgtcacgattggggaccatatcatttctttccatcctttctctgcgcgtttcatttttatactaaaagtatactataagtgtgggcagagaactcttaattttcccttgcaaaattcctaatatcagcggttctgcgtatgcctgccagacgttttgcccgaaagcatgaacagaatcagggtgatgaataaaagaatgccgattattaccagcgcaacggattggacgaaggaacatgtttcatggtattgtctcatctcgtctccctctatccagccgctgtacaggtccagggcatttcccaggcagttatcttccagcacatcacggtctgttatgcggtatgcctttttttccttatcagtcagaaagcgggcggccccctcgtcccagtaatatcccacaggaagggccaccctgccttttgcaggtattctggtgattgcgttgtccaccagagcccaggttctggttccgtccttaaaagtaatcaggtaatactgggcataatccgcatacggcctcatccagaaggtggtccaccggctccgtgtaatggcgggggcagtgaccccgtaggttgggctgcggctgctgtaatagccgcgctgcgttgacggccgggttctgtggctgatttgtttatagataccggttgcttgaaagagagaggcatctgcctcccatgcgccgatatagtttttctgtaaatccgatacagaggtcatgtacccggtcggctccgtacaggggtaacctgccccgtatttcagctcaaaactgccgttatcgtcttttgacagcacttcctctggggttacgggcacggcggaccggtacagaagtccctcagcattcagccgcggagcaatggcaaggaagaaaataaacaggaccacctctgccgcaagcatccataaaagtccataccccttatcctttttcatacctttcgttcctcctgtcatcactggctgtatgcccggatcaaggtgtatcggatcctgaggcatgtattgtcatttgtattataccatacaaataaaatccaggacataaaaaggaaccccgcggttttgatgatgtgatgctgcatcaccgccactgcggggttctgttatgctatgccgggtttatccttcaatggagatatatttcttttcttctgccagtggtttcgcttccttttttggaatggacagtctcaggataccgtgcttgaattcgccctttatatcatcttccgtcatatcttcgcccacataaaagcttctttcgcaggcgccggcataacgctcctgacggatatatctgccgctcgtcttctcctgctcgtccttatccagtcctttggcagcactgatggtcagatatccgtccctgagggatgccttgatttcgtcctttctaaatcccggcaggtccatttccagttcatatcctgtatctgtttcacggatatcggttttcatcaggtttttgcctctgcgtccatataatttcttctccagcttcttcatatccctgctgtcaaaaaatggatccctgaaaaattcatcaaacatattttcaccaaaaatactgggcattaacatacgtcattcctcctctgttttttgtggggctcccggaaaccgttccgggagccatgtatggtcaggtctgtacgtcatatttgagtttaaccttcgattgcaatatactttttctcctccacggccggtttggcttctttcttgggaaccagcatcttcagggtgccgtcctcgaatttggccttgatgtcctcctgggtcactgcgtcacctacataaaaacttctgctgcaggatccgcagtagcgctccctgcggatgtaggttccgttggaatccttttcatccctgctggaatttgttgtggcctgtatggtcagatagccgtccttgagttccgcctttacatcctctttcctgacacccggcatgttcatggttatctcatagccattctcagtatccctgatatcggtattcatcatatcgaatgtcttgtggctgccgaatgagtaatcaaaaaagtcatccaataagttttctccaaaaatactaggcatcaacatatgtcatctctcctttatttaataatctatgaggttgttatattgtactggaaccgcataggaaggaaactgtaaaacttatctcatctcctcttacattcccttctctatctgttctatatgtaatataacacgcgttattagcaaagtcaagagtcgagtgctaatttcacacttttttcacatttcgtattcatttgggctgtttttttcacttttgcagatttcccggtacgtatttacacattgggcctgacgggttctgccagggatttaaaaccttcctcatgaaatctttatatttacctcatgatttggatatggaatctttaaaccgtatggtgctactatcatgtcatccaaagaagtaattcgatatataaaggaggcgtattgatatgaagaaggaattctggagtgatatggcgggtttgggaattatgttattagtcatgttgggagcggctgcactccgggcgtatatctggctgtaacccctgctattgccgtttgacggagtgcggatttaacatcaatttatcattttacatcctgtgttttccttaaatcagtcaaaaaacgtgaaatattacaggaaatccaaagatcttaccatggaaaaatccatgcagggctcctatacttataacaacaccatatgacaaatccggcaggaaacagaagccggtgatatgcaaaggagtgtaagattatgacaagtatgttagttaagtttgaacagccggaacaggtggtagattttgtgaatacgctgagccattatgactgtgatgcagatatcaaatatggcagccgtatggtagacgccaagtccgttctgggagttctttacctggcggtatcccgcacagtggagctgattcttcacattgatgaggatggctccggggatataaaaaacagacttgcgaaatttgcagtatagaaatttgcagtataaacagaacaggattcaaaaaagcagccggttatgacttagccggctgcttttgactatctgattataactgtaatattacaactgtaacggcggcggcgaacacggctgtataggccagccccagaattgccagacgccaatattcttttataattttaaatgatttcataccgcatgcctcccggattttacggattttattttatgcttttattatataaaatccatgtaaattccaagaggcacatttagtaaattctttgtaaaacagtgtctggatattaggttttaccttgcagctatctgttccagtacagtatctcgccgtcatattccatggtcagatattctgtgtcatcctccgttatcaggtggagcgtcaggctgttttgactgttcccatggtcctcatagggcgtgatggaggcagtaatggaactgcctgtttcagtggatccgcctgtctccgtacactgcccctctccgccggttccgatgccgatataatactcaatctctccgttatcgctgatttccaggccgttgcccatatgcaggccggttccgaacatttccagcagagagccatgctgccgtagtccggcatctgttttcggcccgttcagggtccaggaaccggaggcctgacggatgatttcctcagaaacaacacgggtctcacttatgctctcttttgccggtggttccgctgcttttaagctgtccagttccacgtcaaaagattggtcctggatgatgctgccgccgtttgcagccgggaccgtttcatcaccggcagaatccccggcccgggtgtcggaataaatatgaatctcctggtccgtcccgttaccgtccgtcttatcctcatccgccctgccctcatccgctccggcagacactgttccttctgccccaacagcagctccatccgctccggtccccgcagcaggctctgacttcaggccgcagccggacagaaccagcagccccagcagacttgcgatgcaaagtatttttcctgaattcctcaatttaaaatcctccctcatgtaatccatataaaatccgtcatctccaacggttatgtctggttttattgtaaacaaaaaggatgtaagtatcaacttaacatccctttcatatatcttaatttttccgaagtatatttggaagtgaaaacctccggtcatccggacaacggcccggatgaaagaggaaagttgacataaaaatgttatgtcgactaccgagggattttacagcccaatccccccggcctgcgcctaacaataccactattcaataggcgcctgataaaatccgccgtaaaagttttccgttttaatcatattgacaatgacatggggatcctgctcccgcatgagatgcacaatgtcattcacctcataggaggacaccacggtgtgaagcagatacattttcttgtgactgtaacctcccaccgcgtccacacaggatatgccatgtctgtactgtttgacgtactggtttatgatttccggcgccttggtggtggtaatctgcagtgtaacccgttcatacctgtgatggaaggcagagatggctttggtggatacgaactggaacaggatggaatatcctgcgtacagccatccaaacatgtatccgaagatgcagagaatcacgcagttgcctgcaaatacatattcccatatggaccttcctgtcttattggaaacatacagggcaatgaagtccgtgccgcctgtggaggcatttccccttaaggcaatggcaatggacagcccgtacagaaaaccgccgaaaaccacatccagcagcacgtcattgaacaggggctgaaagctgcatattttcagaaaaaagctggccaggaacacctgcagcatggaataaaaggtaaaacgcatgcttatgcttctgctgcagaggatggccaccggtatattgaggaccagcattcccagggaggtggaaatattgtgcccgtagagggaggcaatcctgtcaatgaggatagccacaccggtaaatccgctggacagaaggttggccggccgtataaatgcctggattacataggtctgcaacagggcggacgccacgacagccaggatggttatgagccttctcaccagtatgttctttttgtattttgctatcatggcctatctctccaactccccaaggctgtctagaagcttacggaccagtgcctctgacaccacgtcatagcagttttcatggggcggctctgcaaagccgtaggtcaccccgtgggaagtggtggtggggtctgtcatccagtccttgcaggagctgtgaacctgccttattccggtctcttccatgagcgttctggcattggaggcattgatgccgcttccggccaggatttctatgctgtttccataagacgactgaagagcaccaagcagagcctttccctcgacagcctttggtttcagtccgctggtcaaaagacggtccgcacccagctcaatcagtgtctcaatggactcataggggttggaggtgcagtcaaaggcccggtggaatacagcttcctttccatggctgtggataatggaaatcattcgggcattcctctccctgtcaatggaggcatcttccctcagacagccaaaggcaatgccgtccgctccgtggcggaccagatgttcgcattccctgagcatcacattaaaatcctcttcactgtaacagaatccgccacctctgggccggaccatggcaattaccttcacattgcagtgctccttcaccagttccagggatgccagggagggcgtaagcccgcccaggtgcagggcacagttcagttcaatccgtccggctcctccggacgcagcctgcatggcatcatagtagctgccgcagcatatctccaacatataaaaacctctccttcttcctgtccgccggcacagtaccggcaaaaagcctaaagctgtgccagacggtacagagccagtgcatatatttttgcgttggttaccaggtcgtccacggtcatccactcatttggattgtggctgattcccttttggcccggaaagctgggaccgaatgggacgataccgggcatggccttggcataggttccgccggtggtggttacgggagtgccgttcatgccggtgacccgctcatagctgtcctgcatggcttttaccataggcgtatccttggcaaaaaccacaggatcataattttgtaccagctctgccttcagaccgcagctctcagccttttccgttatgggcttcatgatttcccggatggtgataccgcccggatagcttaaggtggcctcaaagtataccgtgtttgccgcgtttccgtttccggcacttacttctgtgtttttgtttccggcattttcacggcggatgttcccttgaccggccttccagacaggatctaatcccagtctgtaaccgcgcatctccatcataccatattcttcatggtaatagtcaatacccaatcggtcgcctgtattgcctgctccgataaaatatttgtttacaaagtcgaaaaatgtacccaggcattcccttgtgccggtgatgcgcaccactgcccttccccgctcgctgtataccacaggatatttgcagtccggcgtaaatccgtaaacaggaggcttttcttttgacagatagtatctgagatcctcaaaacccgtttcctcgtcacatccgaagatgatgcgcaccggatgcctgaggggaagccccagcgccctgaccgcggccaggccgtagaggcatgccatgactggccctttattgtccaatactcccctgctgtatatgactccgttttccatatggccgttaaaaggaggctccttccagccctctccggccggcaccacatccacatgtcccatggcgcagacatagtcttctcccctgccatagaatgcgtatccgatgtatccgtccaaatccacagtctcaaagcccatatccctgctgatggatagcgccaggtccagggccttctttacaccgggaccaaagggagccccatcccgggcctccctttccacgctgtcaatacgcaccatctgacgaacatgctccaccagctggtcccggttttcgtcgatatagtccagaagcattctgtcaatctgattctgttcatccatattcctattcctcaatgggcgccatgcgcgtcttcatatagttttccatccactcatccgatgccttttcgtaggtacagcggccgtcctcctggcgggtcaccagatacacggttggttccagggcctctgtgacaacggcaaaggaaaatccctctatgttggtggctacaccccactccccctttgagttcatggctataagggataaatcccccgcctcgcccctgcgttccttaagctctgcgtccaggcgggccacggcggtctcacaggctttttggggatgcataccctcccccatgagacggacgatttcataggaaatacagcccttcatcaggtcctcgcccaggcccgtggcactggcagcgccttttttgctgtcagcatagaaaccggatccggatatgggagagtctcctactctgccttttttcttcataaagagaccgctggtggaggtggcggctgtcattttgccgctcatgtccaggcaggccatgcccacggtatcgtggcctgagtatggcttaagctttccggaggctgactggagggccgcctggtcggacatttcctttaaacgctttctgtaatgggcctttgcccggtccgtcagcatatttttgcgctcaaatccctccttatgggcgaatttttcagcaccctccgccaccagcaggctgttgaccttttcacggctcagacgcctggcaatggacacaggattggcaaagtccctgatggccgcaacagcgcctatatccagggtattgccgtccataaaggcggcatccatctccacctccatctcctcatttggaagcccgccgtagcccacagatttatagtaaggaaaatcctccacttcccggatagcagactcgacggcatctcccgcgtccccgccgtccttcagcatttcggcgcccttagtaattccttccactgccatgcgccaggttgcaatcataccccacatcctatatatcctcctctatttgaaacagaatttatgttccagttccgctgtatcgctgccgtcagccagtgcctttgccagtgcgcacatgttcttaagcgcgtcgtttagtcccattccgcccttctttggagtttccacaatggccaccttatccttgtaggcggcgatggtatccttgttctcaacagacatggctgcaaatgcctttgcctttgtggtagcgttgatgtcgcatgccaccttggcgcacatgcccgcatagtcagcgaagttaaaggcagggccgcacataaccacatccggctgcagcttgtttaccatggcgcagagcttgcggctgacctcctccgggtcagctaagaaggttccgttgccgcagcacaggcaggctgtcacatggccgtccaccttatttaagaagggctccatcataactgcgggaccaataggctcctttttgcctgttaggggaaccattgtgtcatcttttgttccaagaccggactgtatctggtcgtatatcataataattttcattatcttcacctcatattcttgtatccccacagggattgtcaaaggatggacggaccgtcaaaggcagccggcctacaggtcgtcaaaggaaaggtcgtcaaagtcaatgtcatcgtcatctgatttgtcagaagccttggcctcatcttccagatactgcttatccatcatcttaataaacggcatatagatgaatactcccagtatgagaagaagcagctgcagtacagctccctgccatcctgttgccaggaatccggacagtaccacgggcatggtccatggaatggcgacgcctgtacagaggggaaccagaccaatgctcatgcagaaataagaaattacgatgtttatagtgggcaccagcatgaagggaatgagaatcattgggttcagcacaatgggaaggccgaatacaagaggttcattgatgccgaatacgccggggataaacgccagtttgcctaattccttgatacgtttggagtggcagaataaaagcattgcaatgagcagcgacaatgtagaaccgcatcctccaaaggttgcgaacaaatcctggaacttctgggaaataatattgggcagcggctggcctgcctggaatgcagccaggttgtcggcggacagtgtctgaaggatgggattgaacacagcgcctacaacggaaccgccgttcactccaaagaaccagaagaagtgaaggaatatatatgcgattaccatggccggaagtgtattgcccagttttaaaagcggtgtctgtaaaattgtaaagatgaagttaaatgcgtttttataaggcgtcattgcaaacacgatattcatgataaagaataccagtatggacacacctgcaggaatcagggccgagaatgactttgatactgtaggaggaacgccgtcaggcattttgataacccagccctttttgtttacccatgcataaatatggactgacaggaaggccacgatgattcccacgaaaatacccttggaccccacccagtttaacggaattccggtgacgctggaaccgccgtccacaagaatctcatagggcatgatgaggaaccagcttaccagggcaatggctgctccgaacagcttatctacgttcatctgctccgcgaaggaataaccaatgcctataacggccagcactgccatgatggagaaggtggcgtcagtgggctttgaaaaataggatgcccagttgtccccgaaaaaccgcgcccagaaatccgtccatcccggtattgggaagttggcaaccagcaggaaaaaggaccctacgattaacagcggcatggacagcaggaagccgtcacggatggcaatgagatatttattttttccgattttctctgccagcggcatgagtacggactctaacttatttagcatgattcatgttcccccatttcaactatgattgttttagcacaggcgggctaagatgctgcgccggactgttattttgctgctttcatgagcttgatcgctgatttcagtactttctcaccgttcatcataccgtaatccgtctgatcgataacctgaatcggaatgcccttgtcgccgtacttttcaacaatctcgccatagcggtatttgacctggggccctaagagaatcacatccgggtgcttctcatcaataatctggccaatctttccgtccgggaatgcctctacttcaatgggaaggtcatgggaattggctacgtcctgcatcttgcttgccagcatactggtggacattcctgcgctgcaaaataaatatactcgtttcatgattaaatcctccttgatatctatatagtttccttttattgttcctgttttataccgatgggtaaaatacggtgtctgaattaacggttttccagctttttttccagttcagcgattcgctcgtagctggcaatcatctcttccgcgatgattttaaagccttccgcactcatgagctggtcttccgcatgaaccagaatcatggagccgcctacctgctctccctgtgcttccttctgaatcagttcaaagtgggcctcatgtccaaccagaaacatctcctggcctgcctttatacattccctggctccctcaaagtctccctgctttgctttctggattgcttcgatgtagctggaacgcgcgcctcccacattggagataatcttgaagcaaatcatttctaatccctctaccattttgctgcctccttattgtttttgaaacgagaaaatgcaacaaaaccattctgtttgctgcatttcttattaagttgccttaattataaggcagttattcactttttttcattaaagacatttcctagctgttaggaaattcaacccataattctgtcaataaattcctcatagctgcatggagccactaattttgccagctcctccggctggtttaccacattggatacccagtcaaagaaaattttaatcattctggcatccccttcgttgatggcgaaaagcatgaccagacgcacctcaaaggctccccatttcaccggattcttaagctgtgccacggcaatggtggaatttctggcaaaggcgccaaaggcatggggaatggcaaatgtgttcacaaaggaggtgggcgacatctgctccctctttaagaccacttccgtgaattccggttccacgatgccctctttttccaggcccgcgcacagcatacggatgatttcttccggctggtccatgtctacctgggagtgataatgctcttttcgtatcaggttcccgatatgggatgtaaactccagacggaagccttttttatccagacggttaatggcctggagaatctttgactctgtttccgagtccacaaacaggttaatggaaacagtctccacatccagtccgtgctccagtggaaaggtgctgagaagtaaatccgggtccagggccgatacctcatcctcctcaaaatagccgaatgcctttaccacttccatacgttcgcggaacatgtcggatatcttcttcacgcacatgtcggaaaaagactggttgtggggcagaatcatcacagccctgtactttctcacggaattcatgcgctcactggcagctcccaggtgaagggcaatgtaacagctttccacatctgatatgggccgttccagccgctgctccagaaactccagcacatagattcccatttcaaaaacaaggggatatttgcgcttgatttcctccacaaacacatcctccatccgcacctggttcttgacacgttcgatgagtccgtgaaaatgcattttaagccccgccaccaaatctgcgtcctgcctgaaatccaggccgaacagggcataaacctgttccagggcttcagccaccagcttcttggtattcatccattttccgttgtaattgacaaaatcgctggtatagttggaagcccgcctgcccatgattaccagggcgaacatgcccacctcgccgtcgtggaccgttatgtgcagccgcttggaaatgcggtcaaagaaggtctgggctatctggtactcaatggtatcctccagcccctgcattccctcctccatattgatgtaattggcgcagttcatccgttcaatgctggtccccgcatggagaatcagcatgggaaacatggactcatggatggaatagtcgtattcctccagcacatccacaaagatatccttgacctcaatcaggttaaaacttctgtagagatgggccagggtgttcagattaagaaagttctcctgcacctcagccaccagtaaatcccggtaaaaacggcgcttgctggcctcgtctccctttaaggagatgcattccttgttccgcaccagcttcaggccgctgtatggctccagcatctttcgtatgcgctttaaatcattgtcaatggaataaccgctgacatagatctggctctggagcatggtaaggttcagctcctttacctcaaacagcagcttttgtatcatgtatgcacagcgggcgccgggagtctggggaatgtctgcctcccttgtctctgcccctgacgccagggcaggccgtgcctcctcgcacagcctgtatccctgacgcacattggactcaatgggcggcgggtccgtgtgcttattgatggcctccacatcggagcggatggtccggtccgacacctgcagaaggccggccagctgccggctggtcatccagtccctccgctctgataatatggcaagcagctgttcctgtcttttattctgcatggttaaactccttctcttacagtcttatacaatacggaatgcgaacaccttccagggctcgatatagtctaatagtacatgttcatactcaggcagatgtccaatcacgttcttgcggccgtcattgggcatatcctttgtgacgatgtggagctctcctttgtatttcaggtaaccgtcattgagaatgaccacatcgcccggccgtaagtccctggtgttgccagccggaatggactggtctgcaaatgttaccctgggccaggtggatcggatcatgtattcgctcatatcccctctcaccacatgctttggctcatagtccaggatctgcttctctgtgtccgtcagctccttttccagttcaatgccgaaggtaaggatgctgggattgactgctgcgcaggcatggagctccttgtccgttgcataggcattggcaatcagcacatcatctaccatgccggtggcaaacatatggcgcacctggaaatccagaggaaggccgcggtgcatttccagggtgcagagtccttcgtttaaaggccatggaccgtaagctccgggcgcattgctggatacaaaggcagccaccttaagacccagtgacttcatcttgtcattgcacctgttaaaatgcttcaggctcagtcctgtgtatgcctgcggataaaagttatggcaggtaattaacttctcacggtccggatggtgatccatgatgttttccacatagaccagcttggtgctggcattcagctccagcttcagcccctgcggattataggtcataaggctttccttcataccgtcaaaaccctcgtccagccggatgccgtccacatgcatttcccggaacacagacaagtcctcataggagattcccaaccttgaaaatacggaggggcttacatccggaatgatttccataccgcaggcatgggcttcgtcagccagacggcggaactgtccgatgatttcctcaccgctcttttcaccaacacttaaaagacaggtaaaaatcctcttataacccagtttacctgcctttctgatatacgctatatcctgttcttctgtggaatgctccggataaatagaaatacctaatcttgccataataataacccctctttccagatttgaactgcaaagcagttctttgatattaactatagcctgtcaagaggggattttgcggtaaatccgtttcctagctgttaggaaacggatttattatatcatagccgcctgtcagagcgtatttataaaatggtgcgcatgagtccttttaggaaaccggaggcctggccctcgtcaggtccttccaccgtaagctccaggctttctccctggtgtgcgcccaggctcatgagagcaaggacattcttacagtccgctgtacccttttggcttttaagggttatacggctctcatattccgcggccgccctgctcagactcatagcattggtagcatgaagcccctgcttgtcagatactacatatttataacttatcatttcatcatcacccttaatttattctccccccattttaacatagttaacttttcttgacaaccaggtgtgttgacaggtagaatagaaaaagccgtgcagcattccggtaaagataaaataccgaaggcgctgaaacggcagagaaagaaaagaccaaaaagaaaagaccagaaaggattggttggaacccacatgaaattacagcgtcttctgagcctgacacgccaggctcttgatacatacgggctgattcaggacggtgaccgtatcgccataggagtgtccggcggaaaggacagcctgacattgctccatgcccttcatcatctgaggaggttttaccctgaaaaatatgaactgtgcgccattacggtggatttggggcttggcaatatggatttggaaccggtggcagctatgtgccgggaatttgagattccatatgaaatcatctccacagaaatcggcgcggtcctctttgatatccgcaaggaaaccaacccctgttctctttgtgccaagatgcgaaaaggcgctctcaatgaaaaggccaaggagatgggatgcaacaagattgcctatgctcatcacagggatgatgtgatcgagaccatgatgatgtcactgttctatgagggaaggttccactccttctcaccccttacctatctggaccgcatggatctgaccgtcatccgtcccatgatttttgtcacggaggcagatgtcataggattccggaacaaataccagcttcctgtatgcaaaaacccatgccccatggacggatacacaaagcggcagtatattaaggagctgatacacaggctgcaggaggacaatcctcatataaaagactgtatgttccgggcaatccttgacggcagcataaaaggatggccccaggcgttgaaataatgcctgaggccatccttttgcacttcccctgtgcttctattccggggcggtctttgatgccgggtactgcttcagataccggtactgcttcagatgccgggtactgcttcagataccggtactgctttagatgccgggtactgcttcagataccggaacctgctttagattcctggtccgccctcgtccgtaccgctttgggcctggccagggccgttgtcctggcttcctggtccagggctgctgctgccggaatcagattcggagccaggggaggaaccggagcccggcttctctgtctcaggggcctttgtgggatggctgccggaaggttctgcggcgccgctgccgcccgggccgctgcttcccggtccctgttcctcatccgtatgtttggtgctttcaggagcctttgtgggtttgcctgatacgcccggccccacttcttcggtctcttctgtttcttcggtactctcctgggttgtctcctctgtctcttccgtctccccggtactctcctgcgttgtctccacaggcgctgttgtttcgggcggaggtgtctctgacggtacattctgggcaggcgccttatctcctgatgaacttcctcctgaggagccgcctccggaaggagctgccttgccctcctcataaagccctgtttcttccgagatatgggcgctgattttacggacagcggaggatggactgtaggacgtctcctggccgtacaggaactgatgaagaaggactacattgctttccagggtggtgggcaccacgcagtccatctttccgattttcatggtctgccttgagaatgggaaaccggcagtttctccgatgtgatacttaccgatatcctttgccagaggcagtacatcgtctactcctacgctggtggaaatttcctgcaccatgtagcctgccagcgaggtcagagttgagaggtcagcctgctttgcttttgccagggcaagctctaccacctttctctggcgctccgttctctggaaatccgtatccatgagacgcagacggctgtaggccacagcctggacgccgtctaaatggttcatcccggcctgctccagctgataggaaccaatacctgttgaattgacggtttctgtaatgaagccgttgatatacttaaattccgcaggcgtgatttccaggtctatgccgcccagaatgttgatggcctcagccactgacttccagttaaaggtggcatagtcatcaatcttgatatccaggttttcctccagggctgacactgcctgcttatgtccacccttaaagtatgcttcattaattttgtgataggttccctctgaattgattttcaggtatgtatccctgtaaacgctgacaaggcggatttcccctgtagctctgtcaatgctgcatatcatctgaacatctgccagtgcgttttttgtattgccatctctgctgtccactccaaaaacagctatattccagtagcctgtaggtttgtgaaggaacagccaggctccataccctatgaatgcaaccagaaggagcaaaagaatccccttccatctgccttttttacgtcgttttgccatttgtccctgctgccgtccggcagatgtcctgcccctttccatagtatcctgctgcctttttgtggtgcgcccctgatttcttgaaacggacggtgctgttctggcccggtcctgattagaggaggcacttcccggctgacgggatttcctgccctgggcatttctgtttcccgcggactgcgcctgacgccgtccttcggcagaaccagacgaaccataagaggatctaagccggcgggcgggcatgggaggttcgtcgtccagatagtcctccatgggaaaatcaatctgcctgtcctcttctgcgtcgtattcctcaccgtaatagtactcctcgtcatactcctcgcggccgtcataggattgtctggcacttctgcgctcaccggctggctgtacaggcctcggatatgccctgctgctctgtctgccgccttcctgcctgccgctgcctcttctggcacgtgccctcatgcgttccagctcatcgtcattttctctgttattcatgattatactcctctttatctatttggttcttatgcggaaatcattccagaatacgccggtaactctcccagttacttgtcacggttcccacttccacattattggaattgcctgtggtctcctggatacagagcatattcccctctgctgtccagcccaggaatattaccacatgggccatgggattaaaccggatacagatgtctcccggcagcagttcatccctggctaccggtgaaccgcagcccaaaagtgtaccggtactctgggcccccagcccttttccggtgaccgaccagtatacccagttgatccagccggaacaatccagtccctttaaaagcctgccgtcctcatccggaacagtcagtgagccgaagccatttccggtataaccaggtgctgatggtttgcctccccagtagtaaggaatcttacctaccgatgtaagggcataccgcacgaaatctttacgctgccggctggcgtcttccggaaccagactcatgtataattcaatctcctgggaattcaaaagtccttttaccggatagtcaactgtataaagaccatattcctgggaccaatcctgggccagcagcgcgcctgccatgtttctggtatccgcattccagcctgtccagccggaagccttgacagcttccagtgtatctgctgcctggaatagactgtctgcctcggcagtgcctttgaccacggccagtaccgtacagtccacatggcccggacaggtccgggagccgtctgccggacctgtatcagaatccccggatccgacggatgacgcatcagaaaaactggccacggctgctgtctcagcttctgcttctgcactggctgccattgagccaactggttctcccacagctgctcctgactcaactgcatcagttccagttgctgctgttccaacggtttctgcgccagctactgcttcaactgcttcagcaccagttgtttccgacccagctactgctgcttcaactgcttcagcaccagctgtttgcgacccagctactactgcgccagctgtttcagctccagctgcttccgacccagctactgctgccccaactgcttcagctccagctgcttccgacccagctattactgcgtcagctggttcaacaccagctgtttgtgctccagctgcttccgtcccggattcctccgcgtcccttcgcccgtctgctgcttcgtccaggcagctgccgtcacaataataaattccgcctatgcgcacagagtacttgtgtgaagcgttccacagcttgtccgcacagtcctccattgttttcatatctttaagtatgccgaagtaatgcagggtattgataatagaaataatttcccttgcattggaagtgcttccggtttcctgttgttcgctgtttacaaagtgcacggatatgttccggaactccggtatgatgccggacggtgaagtgacggctgtctccggaagtcccagcagggctgcaagctgctggggcgtataattgtacaggtcatatagacccgatatccacgaagcgtcctttaaagccagcagatcatagagccggcccgcatagctgtcagccggatccgtggaatctgccccatcctcatagagataggccagattaagtacctgggaatccatcatgtccgcattggagggagttgcatcccggcaggccgcacctggcggaaagagaaaggaaggcgaacccggagccagatctatgtattgtgaggtggtttctacggcccctccctcagagcggccggcagcgggagcattcagtctcccgctgtaacgccccgccatataggacattgcgcaggcgcacactacagtcacggccagggccgaacactgcagaatctctcgtttgtatttttttatcacctgtatgtaatcgctttttttcatgtcgtgcgtcctgttgtgattcataaatcatataattgcaccgcccctcattatatcacacaggcaggtgaatgaatagaacaaaagtcttaaagaatctttaaaatcgcgcataaaacagggattatgccgggcaccggcagggcggctcacccaaaatatggttgacgcataaaatagagtgagctataatattcacaatctgtcacaggagggacagagacacatagcaaagctaagcgccatgcaccttttagcgggtacgtgaacagcaggaacgtctgctgccgtttataaggttaacgaggtggagagagaatcgagaaattcggcgggtgctctcccatgctgtccgggcgtgttgcatactggaaaatatgcgggtaactgcaaaacaaagccagtgtgaccggatgtatgatatcagtaaaaatggacaaaaaatggaatgctgaaaactgcctgtataagacagcttagttttttgctgtctttttcaggaacaacaattgcagttaaaataactgtaactaacaaagaaaggcagaacaaattatgtgtggaataattggatatacaggccctttggaggccaaggatgtattgttaaagggactcgcaggactggaatacagaggatatgacagcgccggtattgcttacttcaaccaggattcccaggtcaggagcattaaaaaggtgggcaaggtagccgcccttagggaatatgtaaaatcaacctgcgagatatcccactgcggaatcggccatacccgctgggccactcacggaggtgtaacggacgccaatgcccatccccacagcttcggacaggtaaccctgattcacaatggaatcatcgaaaattaccgccagctaacgcaggaatatggcttggaaggccgtcttgcctcccagaccgacagcgaggtagctgcggctgttctggattctgcttacaggggatgcggccaggatccgctgaaggctatcgcagcctttacaggtatgcttgaaggctcctatggtttttgtatcctttttgcggaccgtcccggtgagatatatgccgtaaggaaggtaagcccccttgttgcttcctacacccactcaggagcgcttgtagcctcggatcttacggccctgatttcttataccagggagtattttgtggtcccggagggctgtattgtgcgcctgacgccatacaaagtccgtgtatatgatatggactttaaccgtgtggagccggaaacactggaggtcagctggaacatggacgcggccatgaagaacggatacccccacttcatgctcaaggaaatccacgaacagccggaagcccttaaaaataccattcttccaaggatgttggaccgtctgccggattttagagatgacggtattccggactccttattcgcagagtgttcccaggtgcggattattgcctgcggtacagccatgcatgcgggaatggtggcaaaagcactgatggagcccatgctccgtatacccgtcaccgtgtccattgcatctgaattccggtacgaggatccgctgattgattccagcaccctggtcatagtcatatcacagtcaggagagaccattgacacactggccgccatgaacctggctaaaagtcttggctctgtcaccctctccattgtcaatgtaaagggttccaccattgccagggaaagcgattacgtattatatacacatgcaggccctgagattgctgttgccagtacaaaggcttattccgtgcagctggctgccctctacatgattggctgccgcatggccctggtccgcggggcctttggccaggatgaggcacgggaatttatgacggatctgctggatgtcataccggctatggaaaccgttattggacagtctgaatttatccagtcctttgtgcgccacctgattcgtgagagagacaccttttttattggaagaggtctggattacgccttttctctggagggggcccttaagcttaaggaaatctcctatatccacgcggaggcatatgccgccggtgaactgaagcacggaaccattgccctgatttatgataatgtgcctgtcatagcaatagcaactcaggaccatgtatttgccaagaccatttccaatatccgggaggtaaaggcccggggcgcttacgtcatccttctggccaagaaacagtctgtggtggaggatggagtggctgatatagaacttcggataccggacctggaagaccgcttcaccgtgtttcccattgcagtggccctacagctgattgcctattatgcttccatcggcaaacatctggatgtggatcagccccgcaacctggccaaatctgttacggtggagtgacagctcacagctcatctttttctggaatggattcctgacatgaatatccggaatacagcatttttagatgtggtttagagaactatacggtatgatacataccataacggttattcaaagaatactgcatctgaaaaataaaaggagatacgagccatgaaaagaaagattgctttactgctgatcacagggatttgtctggcaaacaccgtgccctgctttgcgtccccgtcaatgaaggtaagtgtttcaagttccgaagaaaatcaatattccacgcttcctgacggggataccctgcaaaaggatgtgggattcagtccaaaggcgcctgcaagcctggctggcggttatctgtttggcagcggaaatattacggaatcatttgatcttgattcaaatggcgctcctgtcaacaaacagaaaggtataagctttaaatatataaaaaaggacaataatacctccaaatccgtttccctgtccgcagaaccagcgtcaggccagtccctttcaagcaatgcgtctgttataaaatatggggagacagacttgtattatagtacggcagaagccaattccctggcctggattgacggggacgtacgctacattcttatggacatcaataagattgtgaccagggatgaattggtggccatggctgaggatatgattgatttgggtaaagatttacactgacataaaaacagatgcagcaataccggcttttgccggcgttgctgcatctgctgttttagatgcttatgttgacatatctccatgcaattcgatgaaactacttctgtttcctccacgtctgcttcacttttgcaaaattcaggatgacatccactgcgccctccggtcctgtgacactgctgttaagacacagatcatagctgcgcgggtcgctccatttcttgttggagtaataattatagtagctggcgcgctgtttgtctgtcttaatcatgatgtcctttgccttggacgcgtctaccttgtacaggtcctgaaggcgttttatcttgtcatcgtcgttggctgtgatgaatacgctgaccacattggggtagtcctccagggcgtaatccgcacaccgtccaaccatgacgcaggaggcctcttccgccagctttttgatggtgtcaaactgagcaaggaatatcttatggttaataggcatatcggaatatcccgatgccgtatagcccatggaataggaatccataaccagtgagtagaggaaactgctggtgggccgttcatcgtgtttctcaaacagctcctcgcaaagtccgctgtgttttgcagccatggataacaattccttgtcgtagcacttaacacccatcttttctgccagtaattcgccgatcatcttgccaccgctgccacactgcctgccaatggtgataattagattatttgtcattctacattcccctttctgcactgtctgtcctgtaggtcataagtcatattttatctattaagtattataactcaaaaattcagaaaagtatatagaaatgtacaaaaaagtaaaaaatagtattaagctttgcgacaaaagtgacaacttgtctattaaagtatgtttttactgcgctttttcatcctggtttcagcttaaggtgcgaaggagtttctcaaagtaatccggcaggggcgctgaaaattccatatattctccggtcctggggtgaatgaaccccaggatgccggcatgaagtgtctgtccgcagagaccgcttataggacacctggcaggcccgtacacagcatcccccaaaagaggatggcggatactggccatgtggacgcgaatctgatgggtgcggcctgtctccagcctgcactccacatgggtgtactgcctgaaacggttcagaaccctgtaatgggttactgcattcttgccgttctggtaattgatgctcattttcttgcgctccactggatggcggccaatgggcgcgtccactgtcccctcatcctctgcaatgacgccatggacaatagcctggtacctgcgggtgatggagtgttccttgagctgggcagcgatggagctgtgggccatatcatttttacacgctatgatgaccccggtggtatccatgtcgatccggtgcacgatgcccggccgcatgacgccgttaatgccggacagctggtccttgcaatggtacatgaggccgtttacaagggtatggctgtaatgtccggcagccggatggaccaccattcctttaggcttgttgatgaggataaggtcctggtcctcatagagaatatccaggtccatgggctctgcgtcgatttccggctccacggcctccggcacttccagctcaatcctgtcgtattcctccacgatatagcttgcctttatgccctggccgttaaccaggacctgccctgatttaaggagcttctggatgtaggagcggcttaaatcagggcaggcttcagcaaggtatttatcaatacgcacatggtcctccatatccgttggataaaattcctgtttcaaaggggtgtctcctcctgcctgatgtatgatgctactgctttttcaatgagaaacatgccatgtcctcgtccttataataaaacatgattaaaaacacaaggcaggcagcgccgatggttacatagcagtcggccacattaaaaataggaaaattaatcagtttaaaatacaggaaatccaccacatatccctgactgacccgatcaatcatattgcccacagcgcctgcgcttatcatcatcaggcagacagccaggggacggtattttccgtctgacggcatcttatatatgaggtaagccacggctcccagcacaaggaccgcaatgagaaagaaaaaaagctgcttttcctgcatcattccgaaggcagcgcccctgttttccgaataatagaattcaaataccccgttccagatgacaaagggcttctggccttttaaggattgtaccaccagtcccttggtccactggtccaggcccacaaggatggcgaaaccaatgaggaagctggcaatcagggattgcttttgttttgtcattatgcctgtcctcctatcacatcaaaaccagccctcatctcatcagccgtaacagtcgtatccacatacgcctgtccaatggccttaagcaggacaaaacggatgacgccggcgtcaacctttttatcgctctgggtggttttaaggacctgatcccacacaagacccggcgcagcgtcaggaattccaaaggaaaggaaggtatttctgatgtccgccatctcctcctctgtaagcatgcctctgagctgggagatacgggcagccccaatgcagcccagccccacgcagtggccgtggtgcatggtgaaattctccagcttctcaaccgcatggcccagggtatggccgaaattcaaaagagctctttctccctgttccgtgggatcctcttccaccacacgcttcttaatcatacagctctcataaaccatggcctggcacagatccaggttcctggcagcaatgccctcacggttgtccttcagccactgataatactcccggttcttaatcaggccgtgtttcaccacctcgcccatgcctgaggagaactgttcctcaggaagggttaaaagggtgcgcaggttggcataaaccagcctgggcatatgaaatgcgcctaccatgtttttataggcgtcaaaatccacgccggtcttgccgcctatgctggaatccacctgtgaaagcagggtggttggaatctgaataaagtcaactcccctgagataagtggcggctgcgaaaccgcataaatcgcccaccacgccgccgcccagggcagccagcatatcctttctgtcaaaacgctccagaatcaggtgctcatacaggtttcgcaccgtatccagatgtttattttcctccccggccgggaaggtaaaaaccgaaacagacttgcagcatccggccagaacagcgcgcacctcctccagatacaggggcgccacattggaatccgtcacaatgcaaattttgtgttccttaacaggaaggcaggatactgcctcctttaaaccgtcaaaggattgggtcagtacgatatcgtagatagccttcccatccctgcatacatttatcctgtcagccatgccagtgtcctcctgattttatacaacaaatcggcagacacaccaggtctgccgcatacttgtcccctgtacaggggcttctttttccttgtcaactacaaatggatattgagtcctgaaacatccatgcccatggcgctgcctgcggccaggatgtcctggaaatccccggacagttccacggaatcaggtgttgcgatgaagatataattagatatcttctgcagattgccgttcatggaataggtagctcctgaggtgaaatctatgattctctgagccacttctgtatgtataccctccatattcagtaccaccgccttgcccgccagaaggtaatcacagatgtctctggaatcctccatggatgtgggtttaatcatcgtcacttccatgctgcgtctcataggtactactttgggattggatcttcctaaaaaccggggcttgtcctgctcctcttcttcatcatattccgtattcttctttgagaacagtcccttgcgcggggcctcctcttcaaagtcatcgtccaggtagtaatcatcctcttcctcatcaggatttaatctcatggtatccattaacttacctaacagactcatcttacactctccaatctctatatgaagtgcttactgggggaaacaccttatcgtgaaccgaaaataccggtaccgaccctgaccatggtcgctccttcttcaatggcaacctcgtaatccccagtcattcccattgagagcacactcatagtaacattatcaatgtttttgccacctatgtcaacagcaaattcaaataattttttaaaaattccacgattttcttctggattatctacaaaaggcgcaattgtcataagtcccttaatatgcacatgggggaaatccttaatctgcataatggcatcctccacttcctctataaggaacccgtatttactctcctctcgggccacattgacctccaaaagaatgtccacatccagtccgagctttgccgcgtcggcctcaatctgctgggccaggcgcagggaatccacagagtgaatcagcacggccttgtcaatgacctggtgaactttgttgcgctgcagatgaccaatcatatgccatcggatatcctccggaagctccggttttttgttcaggatttcctgtaccttgttctcaccgaaatccctggccccggcatcataagcctccataagcatgggaacgggttttgttttgctgacagcgatgagagtcacttcctcaggatttcttcccgccctgcggcaggcatcttcaatatgctttcttacttcttccagctgtttttttatcatattgttttcctcccttattggtacagcagctgtccttcctccaccatggaggcatccagcacgatgtggtcgtacacggacaagccgtatttcatgttcttccgcacagtataatattcactgttggaatccagtatatcaatttgtttgaaaatagtatagcctttattaatattgtaaacacccttcagggaagcagtcctcccaatctggtaacggtccgaggattcgggcctgaccacataatcccctgccttgaagccgttttcctctcccatgtccacgtaataaaattcctcgtccgaatagtaaaccgtagtgggcacgaagacaatggatgtgccgttttccgtataaacttccttataaaaaccgtcctccgaggaatcgccgccctgggtcatgtactccagcggtatgaggtaaaaattcttgtccgtcactgcgctgacaggaattttaaggccgtcagccttatccacttttatctcaaaatccacgaatcggtctgagataaactgttccatatattttgaaaaatccagtttcccgtaggcagctccatccttgcctgtaaaggtggaataggcggccggtgtgctgagggaatagtcgcggaatacgacccgaaggacagtcttgtcattataaagggccgcgtcctcctcgctcagcggaaatacaatggaccatttttccgaagtgacaattttataggccggagagccgctgtcaatcaaatccccggatttatgtactgtcttgacgtaggtgcttcggtcaaaggaagctgcctccacgtctgacgttgtcatggattcaaaggagtcaattccgtaagataccactcccgatacatcggatcggacctgttcaaagacagcccctgactgttccgccagcttgtctaactggtccagggtgctgaagctggaatattccatcactgaggcgtccagggaaattctggcgtcatagatggttccgaaatcctggttctgaaaggacaggacaaaggatgtaagctgctttttaaggtccgacaggctgtcatcggaaagagaactgccctcctcggcattctcttttaacagcgcctccaggttcccagtctcgtccagagaataaatacggcttcccacagaagcacgttttccctcacgcagataataattgatatagccggagcggtctgctgtccgcacctgctcctcacggagaatcagcccgttgtagattcggttattgacgattccgccgtccactacctcatagaactgaatcttctcccgtttcagatacgtataaacgctgaataccaggtaaataaaaatgataaagaagataatcattcccacgttgatgttgagaggcctgcggtaacgtacgacttttttgtttttctttttggccataaatccggcctccttttacaaaatacacatcacttcacaaaaagctgccctccataccaggcattttaatcccagcaggttggcagcctataagtcctgtctgtattttatcacagaaaatgtatcattacaatgaaataatcacatcgcccttagcacactcaggaagctccgcagcgtccatggaaatacttaacacaaaggttatatggtatttttcaccgatatttttcaatgtcatatatgtatcagaaatgtctgctccctccaggcatgacagctttaaaaagctatccaggtacatagtctccaaatcgtgatcctgagagataataccacagataaatcctaaaaatccatcgctgtttgtaagtgggaattcattgacattaatgagacgaattttgttgtttaactcatacatatgctgggcacttttatccagatatacgacagtgccgttggcccccttgattgctgcattggccatatctaacagatgtttggtcttgcctttacctttttttcctgcaataatctgaaccataccaatctcctccttgagttatatatgttgtataaaaaatcaattaagattactctaattatagtataaattcatagaaagcgcaatcactatttgacgattttagaaattatatttgtcatgttatcatataggccgggacggctgtctgatttcagtacaacagatatatattccttatcattctggtccctggtagccatgatgagacaatagccggctgcgttggtagtgcctgtctttcccccgaatacggtcaggccttccggcgtctcccgctcccttgtcatgaaccagtttccgcctttccatgtcttggtgacggcctggctgtccttgtcgtggtagttggccgtataggatgtggtacccacaatctgccggaataccggatatttaagggcctcattgaaaatgagatacaggtcataggccgtggtataatggtccggatcgttaagcccgtgagggtttacaaaatgagttccggtggctcccagactggcagcctcctggttcatcatatccgcgaacttgtcgatgctgcccgcaatgtgcactgcgattgcagcgcctgcgtcattgcccgaaggaagcataagcccgtataaaagctgttccaatgtcagggtatctcccggttcaatgccgcacagggttgccccggattccgtgataacagcatcatccgtcacaactacccgggcgtttaaatcgccgtttttaatggctaccagagcggtcataaccttggtgatactggccggatacagccgttcaaaggcttccttgctgtagagtgtttccctgtcgctgacatcaaaaagggcagctgcctccgatgtcacataattttcgtcaaagctgccttcatcctccactacacataaatccgaagcaaaaccgtctgcatagcgcacggtccgggacaggctgtcctccatgaccgggattcgctcttccaggctgtagggttccttaatgcctgaaagacagcccgtggtggaaagggcgacagcccccagaagaagcgcacacagaaagctgcgcgtccgcactgccttcattacctgactacctctcgccattccatatcgcccctgtcaagcgccttgataagcagttcggcagatgccagattggtggcaagtggaatgttgtagatatcacacaggcggaccacatcgtttacatccggctcatgtgatttgggattctgcgggtcacgtaaaaagatgaccagatccatctcattgtgctcaatctgagcagccatctgctgcattccgcccagatgccctgccagatatttgtgaatattaaggttagccacctcttctatcaggcggcctgtggtacctgttgcatacagtgtgttcttgctgagtattcccctgtatgcgatgcagaagttctgcatcagtttcttttttgcgtcatgtgcaatcaaaccaattgtcatattaaattaaccctccttggattagatatgtcttgtttctctctgaagccccacattgagcaccagccctattcccataaaaatactgattaaagaactgcttccgaaactgatgaacggaaggggaagtcctgtattgggaaagatgcctgtggcaacagcgatgttggcaaatgcctggaacgcaatcagtgttgccatgcccacacagataaggcggccggataaatccctggcccgtgcagccatcataagacattcataaattattaataaaaataaggcgatgaccaccacacagccgatgaaacccagctcctcgccgatcacggcaaagatgaagtccgtctgctcctctgacaggaaattaccattcttgacagacgctatggtggtgttgaaaagccctttgccttttagctggcctgaaccgatggcaatgatggagttgttctgctgataacgggcctctccgtactggtccggataaaaccaggccaggatacgtcctgcctgataatcctttatgaatggaatcataccgtgaagcagcaggtagacaaaggtggccattacgggaatggtaacagccagggttcctgcaatccacttatagcttatgccgcttgcaaatacgattcccagtaccattaccataattacaagacaggtagacagattcggctgttcaaagatcaatgccgccggaatggcaaacagtacggctgctatggccacagtgctgacctgattaatcttttcctggtatttcatgaaataccaggaaaaggttatgataaggcctatcttaacaaactctgatggctgaagctggccgatggccggaacctcaatccagcgcctggcgttgtttaccacattgccccaaatcagtacggccacaaggcttgcaatacacaggccgtatatgagggtactgaagttcaggattttgtggtaatccaccagggaaagaccaatggccacagccagtcctatgaacactcctaaaagctgcttgttgactgcatccgcgttcatattcgtagcgctgcggataaccagcacgccgatgacgttgagtacaatcatataaaatatcagccgaaaattaaaatgtctgaaatcataatccaaaaacatatttaatatagccccttgttcgatatggaacgaatcggtatgttggcatgaagcacaggcagtgtccggcagccgcccttttggggactgccctctgtatccatctgtatctggactttgtccttttctatctccatatatttggaaatggcgtgtatcacgtcatcttttatcatcagtatcatctccggtgagcagcctgccttatcggataccagcaaaagctttagccgcatcttagctgtctctccggaacgcctggtttgaaacccctggaaccatctcaccttgacaccatcccttctatgctctcttaagtattccgcgcagcctggcaaaaaaggtttccgtctcaccgggatttgtcataggtatgctctctcccagtatcctgcggcagatatcaagataagcctgtccggccgtagagcccagtcccaccagaggttctccctggttggtggaaatgacgatgttctcgtcatcgggcactgctccgatgatgtttactgccagaatgtccgtcacatcgcttaaagacatcatgtctcccctgcggaccatgtcggcccggatccggttgacaatcaagtcaatctcgtctatctccgcatgttccagcagcccgatgatacggtctgcatcgcggatagccgaaacctccggcgtcgtgactaccagtgccctgtcagcaccggctatggcattgtaaaatccctgttcaatgcctgcgggacaatctaacagtatgtagtcaaattcttccctcaggtcatcaaccagctttatcatctgctccggattcacggatgtcttgtcccgtgtctgggccgaaggcagaaggtataggttcggatatcttttgtctcttatcagggcctgcttcatacggcagttgccttccaccacgtctacaagattgtagacaatgcggttctccagtcccatgactacgtccaggttgcgcaggccgatatctgtatcaatcagcactacccgcttacccaggatagccagtcctgttcccacattggcagaagtagtcgtcttgcctaccccgccttttccagaagtaatcacaatgacctcgctcatgatgaaatcctcctgaaaattactttaccttcctattgtacattaaatttcgtaaatttaccagtatttttttggcattaagcaaaatttaacatattgtttaggaatgacttttttaaagaccgcataacaatggccccatcttccgccagggctatcatgggtccccgccccagacgcttgtttctctcgttgaaacggctgctcatatccccgatgcggatttgcaggggagccatgtcaagggccatgacaacggcctggggattgccggacacaccggctgtcactgtacctttaagttctcccagtacaatgacattgcccttggccgtcacccttgctccgtgatccacatttcctatgatcacgatgctggcctcggattccaggcagtctccgcgcttcagtgttccccggtagaactgccctgtctgggagttcagttccatcagcttatcattcagtgctttctcacagcgttcaatccgttccgcatccgtgtccagaagacagaggacttcaatctgtgagttcttcgtaatcgtatcgacaattgcaaattcctgggccgcagtcagatcccggccctccagggtcagggtcatctggaccgaaccccagaaacgggcgctctcactgaactttttcccgatggcgtccaaaagctcgccaaagggcatttcagggtccaggatgacagtcattcctgccttgctgctcttgattacaactgcattgcgcatacaatcacctcttttgctggtttagtcaccaatatttacatttgatacacctaatgcaccggagctttctatctgctccagggtggtatatttataataatactcgtacacctttttgccaagggttgcggcgttagttcccgcatatccgtaaggaatatttacagtcacggcaatttccggatggctgtaaggcgcaaaggaaacgaagaaggcatggttggaacggctcttgtcctcctgggctgttccggttttgcctgccacctccacagggaggtcggagaaaatactcttggcggagctgtccgtgattacccggcgcataccggtctggaccgcgtcccaggtactgtcagccgcgtccacatgggagctgatggcaggggtatagtccttaatcaggttgccgtcagagtcggtaagtttatctaaaagactcagctcaaatacatttccgcggttggcaagagctgccacatagcgggaaagctggacattggtgtaggaatgggtgccctgtcccatggcggaacgctccgggtcctccgatgatatctggggctcgttctcggaaatctccacacccgaggtgtgatccagaccgaaaagggtggcgtatttgcgcagggtggcaagaccctggtccggcgaataggtgccgtccggcttcatacagagcctgtgggccagctcggcgaagaagtagttgcaggagttctgtatgccttcctcgatgttctcgctgttatggcgtccgggccagatccagcacttgatgggcttggaaatctgatcgtatataccggtacactcgatggtgtcctgaagtcctatcacgccctcttccagggctgccacagccgtgatgggcttaaaggtggaaccgggggccttctgggcctgcgtggcgttgttgtaaaggggtctggacatgtcgtcctggagctggctgaagtaagccgcgtccacgctgcccgacatcaggttattgtcatagctgggatatgtgaccagggcccggacttcacctgtttttacgtccgtcaccaccactcctgccgtacacgggtcaagagccagctgcgccggcgtcagctccaggttggatatcttttccttgataaactggtaggtgtaggtggaatcccccatctggagggcggctatggcctgggcgtcatatgccagcacgccctgggcataaagggccagacagagctcacggcctgttatgacctcatcgttaatcaggtaacggaacatgcgctttgtaaatttgttgtcgctgcgcagggattcgatgacatggtccaccagctgggtgaatatatcgtctgcatcggagtatttactggtcacgtccagacgggtggtgtccacccagtttcccgcgattccgctgtaaatataatccctcaggctgatagtgccatcccgccacgcctggtattccggcgaggactggtcaatcttatccttctgtatgatccccacggacccgtcagacagataagcatagatataattcatataggtagccatgtccttgggaagatcgttcatggccagggcatgggagctgagaagctcgttgcgtatcgccccaagtatctgatccctggatgtctcgtatttgctgtaaatctgtttttcaatgtcggacgccccttcctgggacatatccatcagggacagcacattgttgttaatcagctggtaataggcgtcctttacaggaatgggtattttggaagggtcataagtcttgtcggggtccaaatcatcgtactggagatggtagctgatgataccggccagctgctgctctatcagcttgtaaatagcaatctgcagatccctgtcaatggtcaggtacacatcatccccggccttggcgtccgtcttttcaatgatttcacggggacgccccatgttgtccacatacatcctggagtagcccttttctccctgaagctccagctccatggatttctcgattccgatacggcccacaatatcgttgagatcgtacttgtccggagcgtcttccggcaggccggccgcctcatcggactggtgccactgctcgttcagggcggacagctgatcctcctgaaccttgccggtatagccgatgataggggcaaaatagatgctgtcctcatacttgcgcacataggactgctccaccgcaactccctttaagtccgcggcgttctcattgatttccaccatggtctcattgctgatattggtggccacggtggtggtctcgtacttctggtattcggtcagcttcatggtatagataatattgatcatgcccagggctatgttgtccggtatgaccaggggattgcctttttcatccttcatcttatccagctcataatccaccttcttgcgctcaaaggcctccctggccgtgatgttggtgggatatttgccctttgggtcatttaggcttgcggtggaggaaagaccgtaaaaattcaggaagaaacgggttctggccgaatcagagctggatgtgaagaacatctcaccgttctgatcaagggcaatctcgaattttccctccacagtctcaccgcggcggtccagtatccgtaccaggcggtacagcatctggttgcgtgagctgggcctgggataatcccccaaatcctgtatggtaacggaataagccagctcattataagccagcctgttgccgtttctgtcatagatgttgcccctggaccccggtgtggtgacgtttttttccgtcctctgcatataggtttcctggtattcgcttccgtccagaatctgcatctgaaacagcttgcctaacagcccggcaaacatgacggtaaacatcacggaaagggcaaagagccgtgagctgaacagcttcttgaaaaattcttttacaatttctaacagttcgtcaaacaagttttgtgtctctcctttttcctatatcctccacacgtctgctggcggaaaggaacagcctgtaaatcaaaagagtggtaactgcagtaaatataatctccggaagcatgatgttcctgaaataataaggaagattcagacgtccgcggattaagaagcggaatatatatatatacatgctgtaccagattccgttgaaaatactgagtatcagcggaagggtgatgtagtcttcgtaatagtacttggtaaaaatgccgttggcatagccgatataaatatagataagggtataaaagccaaaaggcccgctgtagaaaaggtccagtaaaaggcctgaaagaacgccgtaaaacatccccgcattcttcccatggataaagccgaaggaaaacgtaaggattaaaagcagattgggcgttgccgacaaaaacgggagcaggggaaatacacagttttgcaccgtaaatgccagcacgataaacaatatattgatgagtacctgttttatctttgcttgaatcactgggcagccgcctctcctgtatctttgatatctgtaataatcagcacctcctgcagattattaaaatcagccaccggaatcagatagcctgactgggtcaggtggtccgggtcaatggagacatccgcagcatatccaaccaggatgcccggaaggaacttggtgctgatgttggaggtgacgatctgatcgccgtccctgagaaccgcatcctttgaaaaatccgtaagcttaagacgcccctcctcatagagggtcagatctcctgccacaatacagttataggaggaatccagcttcatggctcccacacggctggaatcgtcaatgatggaacgcaccgtggcgtaattggcgcccacatccgtcacaatgcccaccaggccgccgtcggcaaccacgttcatgtccacggccactccgtcggcagaacccttgttgatgcggaatacctggaaccatttttctgaatcacgggcaatgaccctggccccgattttatcatactgcatgtaatcctggtcaagctcatagagcttccttaagcggtccagttcaaactgctctgcctgcagacggttattgtcctctgtgagctgtacaatctgggtcttcagttcctcattttcccgcagcgcgtcttttaggctgccgtaatcctttaattcgttatagatgccggttcccactgcgttgactcctgtctgtatgggaatcagaaaataacccacaccggtgcgcaggggttccatgatgccgtccttcagggatgtgatgcagatgagcagtacgcacagcaccgtaagtcctgccagaatatatttactgtgtttggtttccatggataaacttcctcttacattaaattctcttcgcggaaactgagataccgcctgtctccgatgacaatgtgatcgatcagtgtgattcccaccaggtctcccgcttctttcaggcgtttggtgagcagtatgtctgctctgctgggggtggggtctccgctgggatggttgtgaaccagcaccatggacacggcccggcacctgaggccttcgatgagtacctcacggggcgtcatgacagatgcatttactgtccctctggccataatctgatcacgaaccatggcctgcttggtattcagaaacatgacccggatttcctcctgctccagatggcgcatatcttccatataatagtccgatatttcctccggacggccaaagtaaagagtatgctcgctggccttccgcttccagatgcgttttgacagctctcctatacaaagcagctggaccccctttaccttaccaactcccttgattcgtgtaaaatcatccagggaatggtgcaaaaggcccagcaggccgtctccggggcttcccagagccagcaggctgtctgccaggtccagggagtttccttccctgcttccggtgcgcaggatgactgccagaagctctgtatcggacaggctgtccggacccagactcagacatttttcataggggcggtccttgtggggcagatccttaattcttattctttccatctctctcctaactacgcacctctccaagcacaaagtcaggaaaattatatataccggtaaatgatgagtgccactgccacgccgatgatactggccatggtaatcttgatggtcagtccgaaggtgatgaccaggatgccgaaattaattaccagaggcgaatccagcccaaaggattgtccgaaattcagccagttcagccaggaaatcccttctgccagctgtcccataaagcctcccaggacaatgcctgccagcagcatgattaaaagtatccagaaattcttgtaatgcatgtgtcttaccctccggtcagtcaggccaaacccctaggccgcaggacctgggttcagcctaattagtatatattaccataagtttcctggggtgtcatcttaagattttcaaaaccccgtcatccaacagctgctgcaatgacttgagtattcccagctttgcatggtaccaggtcagtcctccctggaaatatacggcatagggcggcttaatggggccgtcagccgagagctcgatggacgatccctggacaaaagcgcctgctgccataataacagggctgtcgtatccaggcatatcccatggttcgggtgtcacatagctgtccacaggcgcggctgcctgtattcccttgcagaaggatatgacgccctccggcgtgccgaaggtgatggcctggatgatatcgtgacgggattcactgccgtctggcaccacgccgtagcccaggcgctcataaatattggccgcgaatatggcgccctttaaggctcctgacaccacaacaggggaaagaaaaagcccctggtacagctgctggtttaaccccaggctggcgcctacctccttgcccagtccgggagcgcttaagcggtaggacgcccgttcaatacagtcctttctgcccacgatatagccaccgatgggagccagtccgccgccgggatttttgatcagggaacctacaatcatatccgcccccacatcggttggctccagggtttccacaaactcaccgtagcagttgtccaccatgcagataacgtccggttttatgttctttatgaaggaaatcaattccccaatccgcttcacagacaatgtgggacgggtggcgtaccctttggaacgctgtatggtcaccagttttgtcctttcatttatggctgccgcaatgccctcatagtcaaaggaaccgtcctcaaacaggtccacctggcggtagaccaccccatattccttaagggaacccacagaatccctgattcctatgacttcctccagggtgtcatagggcttgcccacaggcgacaaaagctcgtcccctggacgcaggttgcctgacagggccacatgaagggcatgtgtgccgctcatgagctgaggacgcacaagggcgctctcaccgtggaatacgctggcatacacatcctccagcgtatcgcgtccaaggtcattgtaaccgtaacctgtggtagctgcaaagtggatgtcgctgacacggttgtcctgcattcccttgataaccttcatctgattgtattccgccaccgcatcaatggcctcaaagcgttccctcagcgctttttccgtctcagccgcaaactccctgacttcccggctgatgccaaggctttcgtacatctggttcattccatttatatccattggtttataatcctccgttttccggtttgttattgtagcacgattccctgctttgcgcaatcctctaatatccgttccagaacgtttgagacatcccctccgaaatcaggcagattcaaaaagcgcacatccctttcccgtttgaaccaggtcagctggcgttttgcaaaatgtcttgtatcgcgtttcagtatatatacagcctcatccaggctgcatctgccctccagatagtccagaatctccttatatcccagcccctgcatggaggtatggcctctccggcagcccatatcctttaatgcctttacttcctccaccagtccctgttccatcatcaggtccaccctgcggtcaattctctcatagagcagggcccggtccgtgttcagaacataatagaggaaattgtagggggattccttctccctctcctgctggttatggagggaaatcttctcccctgtctggcggaagtattcaatggcccggatgacacgttttatattgttggcatggatttgggcggctgcctccgggtccacctggcggagcatggcatgaaggagctggggagccctctctccctccctctcagccagggcttccagttccctgcggacagggctgctgtcctcattttctttaaaatcaatgtcgtacagcagggcctgtatataaaagccggttccgccggcaatgacaggaatgcggccgtggctgtaaatctccctcagggcctcctttgccatctgctggaaggtgaccacattaaaggagtcccggggatccagcacgtcaatgagataatggggaaccccgtccatttccccgggagtcaccttggcagagccgatatccatatgcctgtatacctgcatggaatccgcgctgacgatctccccgccaatggcctttgccagccggatggaaagggcggtctttcccactgccgtgggtcctgtgaggacaatgagcggctgcttcatatgttaaaagctcctttcagacaatgcgtttgaattttttctccagctcatacttgctcatggagatgatggtaggcctgccgtgggggcaggcataggggttttccaggtccagaagctggtcaatgagcacattggcctcctggaaggacatggtatgatgtcctttgacagctgccttgcaggacatggaggccaccttttcatagatgatgtccgggttatgtacagacatatcctccgagagcccgtcgatcatctctgtcagcagttccttcttggcaatggaaaacaggttggcaggcacgccgcgcaccgcgtattccctgccgccaaagggttctatctcaaaaccgattcccgtgaaataatccatatatttctccaggagaagttcttcgttcatgttcagtgtaaggataatgggcgggtccaccatctgcatgtcgtactgccttgtctttaaggacttgatggtattctcatagagaaccttttcatgggcagcatgctggtcaatgatgaacagctgttcattgtactccaccatccagtaggtgtcaaacagctggccgataagcttgtgcttcagcctggccttggggtccaaaagcttgccgtcaaacaggtccagctgttccggcccggcggtgcagccggctgtaccggctcctgtatgggcagaagcggtaccggttgtgtctgaattcccggtcataccgggttccggatgactggggactgtctggccggagtctgactgaccgggcgctgtctggccgggggctgtctggctggaaattgtttggccggggcctgtctgaccgaagcctgtctgaccggagcctgtctgaccggaagctgtctgaccaggtgccgtctggccggaaactgtctggccggagtctgtctggccggagtctgtctggctggagtctgtctggccggaagctgacccgccggccccaatatccttcccggcagaaaccgtgttttccgtttgatggggattaactgcggccggggagactgaacgtttttcctgttcctttcttctctccttcagccagtcaggcatcagctcattgacaaaggatggcctgggcggggctgactgggcgtaaactgaaccggcgccggaggccgggccgccgttctgtacctggacggggctgccagaggttttctggcttaggttctcccgcctgcgcacctcgaacggctccgggcggggagccagtttttctgccagctgtctggcctccttttcctgttttgcttccaggctgacctgggggatcagctccttgtgggccagggcattgctgacagcccttaacactgcatggtacaccttttccccgtcggcaaagcgcagttccatcttggtgggatgcacatttacgtccagggtgtccggctcaatatggaaatgcagcatggtaaagggatacttgtgctgcatcatatagggtttatatgcctcctcaatggccttggatataatggaactcttgatgtaacggccattgatgaaataattttcataattccggttggatctggctatgaccggcttgcctgtaaatccggtgactgtaatccagtcctcattgatttccaccgggagaaggtttcccgcaatctcccgtccgaatacagtatatatcaggtccttcaggttgtggtttcctgaggtgtagagcttattttgattgttctgtatgaagcggatggaaatatccgggtgggaaagggcaatcttctccaccagggccgccacatgggcgccctctgtcatgggtgtcttaaggaatttcttcctcgcaggcgtgttgtaaaacaggtttcgggcaatgatggtggtaccatcaggggcgcctatttcctccagccccttctcaaccccgccttcaatctggtaccgggaaccagtaaggctgtcccccgtctttgtaatcagctccacctgggccacggccgctatgctggccagggcctcgccgcggaaacccagggaggaaatggtgaataaatcctccactgtcttgattttacttgtggcgtggcgcaggaatgccaggggtatttcctcctttgggatgccccatccgttgtcggtgacgcgaatcatggaacagccgccgtccttgatttccacggttacggcggtggcatgggcgtcaacggcattttccagcagctccttcactacggaagccggccgctcaatgacctcgccggctgcaattttgttgatggtgctttggtctaaaacagttatgttggccatgtttaagttcctttctgtctgtactcagccaaaaagtatctctaaaagccggccccaatctcagatgccagggccggctttatcagttgctttttacaggtatataatccctgacctgtatctactttaccgacttgccggaacgttcgaaaaggaacgtgcgcaggccgtttatgcagacagcgcccatctgtctcttatccagaagatagccgccatggtccatggtatataacaccaggcactgctgtgtctcgcatatgtgggatatctggctgtatgcgtggactgccctgcatccggttggaacagtctgaattaaagaggccgctgcggataaagcccggccccatggtgcggaccagatacgccagaatcaggaagagggtcttctgttatcatatcagattccttttccttgctgcaccggcggccttccgccccaatactgcattacatgatgcagcacggtttatcccctctctttatatacaacaaaaccagataaaacacaagccctttttacagaaccatgggcctttgaaccatgggtcttaccaggttatgggcactacaaatccataagtccctccagaacatggacctccatgcgtccctgctccaggtccacattcagaatacagtcaccgatagcgggaagcatcagttcctttccgtccttcatggcaaccacatatacatcattggcccctgtttccagcacatccttaagggttcccagctccgcgccctggtccgataccacagtaagtccaatcaggtccgtgataaagtattcatcgggctccaggtccacggcctgatccctggttatcagcaggtccctggatttatatttttctatttcatttatattgtcatatcccctgaatttgaggatgaccatgttcttgaagaatttcacatgttcgatttccatgggaatatgctcttttcctgtgtcaaggatgacttccttcagctctttgaaacgtttggcgtcatctgtggtggggaatacctttacttcccctttgattccgtgggcggaggttatgactcccactctcagcatgttttccatacacctgtcacctttctgtgataagtaattttacggataaatgttccgggacaatattcccgggcaataaatgaaccgccagccctgcggccagcggtccttcattgtctgcgtactgaatcctgcttactgaatctcaacgattactttcttgtcttccttggatgcagcggccttgacaacggaacggattgcctttgcaatcctgccctgcttgccgatgaccttgcccatgtcggcaggagacaccttaagctcaatcagggtgtcctcgcccttcattgattcggtaacaacaacttcttctgggttatcgaccagtgctttcgcaatcacttcgactaattccttcatcttaacacctcattgtcaactactgaatgccggcgatttttaagagctttcctacggtctcagttggctgtgcacctgttgctaaccacttcttagctgcttcctcgtcaaatttgatgacacttggttccctggttgggtcataagtgccgatttccgcgatgaatttgccatcccttggggatctggaatcagcaactacgattctatagaaaggagccttcttctgtcccattcttcttaatctcatctttactgccatgtgatttcacctccttgtgaattgttcttatattagacatacaggagtattcctgtttgactagcctggtctgcggattgtggtatcagcattctgtgtcctaaaagggcatcttcatcttgccgcccagcagtcctcccagaccgccgaatccgccttttcgcttgccgccgcccataaggcccggcatctgcttcatcattttcttcatctggtcaaactgttttaccagacggttgacctcgctgacctccacaccggcgccttttgcaatgcgctgtttcctggaagggtttatgaggtttggattagccctctcctcctttgtcatggagaggatgatggactctactctgtgcatggatttttcaccttcatccatatccacaccggacagctggtttcccatacccggcatcatggaaagaatacttcccataccgcccatctttttaatctgctgcatctgggtcagaaaatcattgtaatcaaattccgccttgcgcagcttctggctcagctccttggcctgttcctcatccacctcggcagccgctttctcaatcagggactggatatcgcccattcccaggattctggaagccattctgtccgggtagaactgttccagatcagacagcttctcgcccataccaacatatagaatcggtttacctgtgactgcgcggatggaaagggccgcaccgcctctggtatcgccatccagctttgtgaggatgacaccgtcaatacctatcttatcgttaaatgtacctgccacattcactgcatcctggccggtcatggcgtccaccaccaatatggtctggcagacatccagattgtcctttatctctaccagctcatccatcatggtctcatcaatgtggagacgtcccgctgtatccaggataaccacgttaagtccgttcttggatgcgtgttccagtgccgccttggcaatgtccacaggcttgtttttgttgcccatggagaacaccggaatacctacccggtcgccgttaatctgcagctgctctatggcagccggccggtagatgtcgcaggcagctaacaggggcttacgtccctttgccttcatctttgctgcaatcttggccgtggtcgtggtcttacccgcgccctggagaccagccatcatgataatgctgatttcgttggagggctttaaggaaatctctgttgtctcggaacccatgagctttaccagctcctcggtcacgattttgatgacagtctgtcccggtgtcaggcttccgaatacatcctcgcccaccgcccgttcctgaacggacccgataaactgtttaaccacacggaagcttacatctgcttccagaagcgccatcttgacttcctttaacgcggcttttacatcggcttctgaaagacggcctttaccgcgaaggttcttgaatacattttgtaatttatcggataagctttcaaaagccatgaaataatcctcctaagactgcactgcattcaatgaatcacacatcaaagcgtgctggtgatttctgcggacaaccgcctaatctggtcaatgagtgccatatccctggtgcgtatgcattcatcagagagacgctccagctcgccggctatctccttgactttaatgaacttggctaccagatgaagcttggcctcataatcctttagtatcttgtcgcatctttttatcaaatcgtggacaccctgacggctgattccctgctctcccgctatctcgctgggggaaaggtcaccgaacaccacgtcctcgtatatcctgcgctgatgttctgtcagcagttctccataaaaatcatataacaaaccctgttccacaatcttttccatttcaaccacctgtgctatcatacacgatagaaaaaggattgtcaagcattttcacttgacaatcccaaaaattattgatagtaaacatttttgtttacagatatcagcagtatggcagcaataaagcatcctataataagaattcggtatattccggaaaaacgggcgccaacctggctgtcaatgagacagaacaggatactgccaaacatcaggatggtgggaagcagcacaaaaaacatgtattttcccttggaaacactgcggggaggcggtgtgcaccgcaccagcttcacaagaggaatcctgccaaggcggaaacagggaccgaaggtaaaggaagcctgataggcgattccttccagccggaccagggcataggtgaattccagccggatcgtctcatagtccagattccttctggccgcgtaaagagctgtctcccgcgcaaagtcctccggtgtcaggatttccccctcaggttcaaaatagatgtactgggagtggagttccttatgaaacatcttccagtctttcctgatatcctccaaccaggtggtattgccatcttcacggctgaattcctccagacagctttccacgatggaaggtttcagcgtctgctgttcttccagtctggaacatatctgttcaagcttctttaactgtgacatttccccgtcaatccggtccagacgcatgcgcatcagatcgcttacgctcagccgcccctcaaaatatccgcggatatcccggatgggaattcccagctgccgcagaaaacggatttccagcagacgctgtatatcttcctcgctgtaatccctgtaccggtttccctctgtgcgccggggcgctaaaagctcctcgctttcataataacgtatatttttccggtccaggccggtacgggcctcggcttctttcattttcataaactcatctcctttctgtttctgacttgattataaggtatccaccaactgtacagtcaagggaaatgagtgaattttatttgttttatattggcactccctgaatcccggaaggaattaacacaatcaaaaagggaaaacaattcagttttccctttcaaaaacaatggcataattgctgttgcttgtcaatacccttttttcgctggatgggcttataatctggaccagccgccatccctgggcagattcctccctgataatatctttacacttctcaattgtttcagcattaccacttttcaaatccccgtcaaatggaacttccacaaaattatattcatattttcccatatccgcaactctttctcttttgatatttgcacttattatagcgctggatatcataaagatactatgggaatttataaagggcatataaagattatatatagattcaggaatagttcctattatcggtcacagaggggtttgtaattctcttccttcataatgcttgtataggcagggcggataatcttatccatattaatcaattcctcaatacgatgcgcgctccatcccacgattctggcgattgcaaagatgggcgtgaacatttcttccggaatatccagcatgctgtatacaaatccgctgtagaagtccacattggcgctgacgcccttgtagattctgcgttcctcggtgataaccttggggcccagctcctcaatcatggaatagagggcaaattcctccatacggcccttttcctctgaaagctggcgcacaaagcgtttgaaaatctcggcacgcggatctgacttggaatacactgcatggcccattccatagataaggcctttgcggtcaaatgcctctttgtgaagcagtttcttcagataggattccacctcatccctgtcagtgacatcctttacctcactccttaaatcctgcatcatttccactaccttgatgttggctccgccgtgcttgggtccctttaaggaggccagggctgcggagatgacagaatatgtatctgtgccagaggaggtaaccacatgggtggtaaaggtagagttgttgccgcctccatgctccatatgcaggattaacgccaaatccagcacatgggcttccacctgcgagtacttcatgtcgggcctcagaaggcggagcagattctctgcagtagagagattttcgtccgggcggtgtatgtacatgctgccgtccctctcataatggttataggcatggtagccgtacacagccagcatgggcattacgctgatgagcatcatgcactgtctgagtacattgggaaccgtaatatcccaggccttctcgtcataggaagccagggtgagaatactcttgctcagggatatcatcatatcttttgtcggtgctttcattactacgtcacggacaaaatttgtgggaagtgtacggctgaatgccaggctttctttaaattttgtaagctgatctgcattaggaagttctccgaacagaagcaggtatgcaatttcttcaaaaccatatcggttttctctcactacaccgccaatcaaatcatagatattataacctctgtaaaatagttttccttcgcaggggacctttaccccatccactactttgttggcttcgattttggacaccttcgtcagacccgctaccacgccgtttccgtttttatcacggagcccccgcttcacgtcgtacttttcatacagttccaaatcaatcctctcatcgctcagacaaatgtctgaccactggctcaagttgtccataaattcctttgtttcaatcatgcaaaacctctcctttcgactgtttgattttctcttataaaattcctcctgtaaaagtggtatttttactattttattccattttaagattttttgcaaactttttttacttttttgtataaataaaagttcaaaacaggaaggattcctgctctatcacctgtttttcagcgcagattttgtctatgaggggctgaaggagcggttcggctgtccgctggagtttttccagtttactggtttctataggttcaccgtaggccatatactgatcatacgtttgtgtatccataaggtatggatacagtttcgggaaaatgcgtttcttaatatattgaaatatcttaactcctccataatccaagtcgcctgtgtggagataggccgtcccacaggaagtatgaatgccggacaaaacccgttccagctgaatcagaaacgcacgctcatccggagaaaagtatccgtgtgaatatatgattagagtcccttcctcatagggcatgctttcataattcgctttattttccactgtaatcacctttgaaatggactgctccggtgggatagatgcgcttctgagcgtctgattattaaagacaaatccactgggaaacagggaaagatttatcttgtttcctgccagttcaataatcaggtttcctttcacggctaactcttgggcatagccgttaatcatcagctgatccagtacctgccggtcatccatgtcatcatttaccgtgtccagataagccctcgcagcagataagactttggattgcagatgtttttcaaatgccttggatttacccagatattttttactaaaaatccttttgtagactggttcctgtagacaatctatggccttgaaacaagtaaacagcagttcccgttttggggtatccagtgctttgggaacatctcctttatccagactttggagaaaggattggtaatagctgcgtatccactggctttgtatcaaagcaagctgttggtccacctcttctttcagtttattgatacgcttgaacttcggtatttttcccagtcgttggtatatagtctccatctgttccaggctgtaccacgccttctccgcttcgataccgtactgataccatttgaccttcaccagcccttccatttccagttccataagctggttcataaagtcccgttttcctgtctctttaaaatcctgttccctgaatatgacagagcgttttccgctcatacctttcttccagtccacagtactcttctcgtatttttggataatacattccagcggtgcattcataaacagcttcccctccctttttataatgacggttattataacgtatccgcaaattcatccccatcttctatatcctgcatcagctcaacaaagcgctcccgttcaaattcctggatggatatggactttttgttggggtttgcaaagacaaaggtcttgtccacgttttccacgtaattctggattttgtcattggtggcgctgatgatggcctggaacccaaggccgcggatgagttcaatacagctggccaccttctccccgtccatcttggaaaatgcttcgtccagcaccaccagacgtatggttggattgcgctccaccttggagggcagattgatgcggtaggcctgggcaaagctggccagaagagccacatacagcgggttctgtccttctccgcctgaattcttcttaatcattttgctcagccgtattttgattacctcgtcttcattctgtataagctgctgcatgtcaaaggacaggtaggtgcggtaatctgaatacttatccatgttccgcctggcctcgtccatctgctccggggtggcgttttccgggggaatgaaaatactgatgagttcattcatcaaatccccatactgtttttcatgctctatggtaaacaggtccatctggttttcataggaataattgaggtcggccggattgatgtccagtgaatcatccataaacatatcgtagaaacgcccgtcaggtcctttgttgcggccgataacaaactggtatttgtcctttccgaaatccaggcggctgatgatgcggttcagctcatccttgcgtatcagggcctcccggattgcgctgcggattttatacataaagtcatcccggaaatgttccaccgcggatttggcctgctgcgttgctttctgcttgtattcttccagattatcgcatttcaggtcgcttaaaaggcggtcataggcagcattatctctggcgtttaccgtaaaattgcggttggggtaagtcctgatatagctggtcctgacggccagaagctcctgaaaagctgcttccctggcctcagacagtttgctgcacctggcaatgaaggtttccttttccctgtcatagcgcaccgtatccctggagggcagataggctgacagttcgttgtcatagtcaggattctgctttaactcccgttcctttgacgtgagaagggactggctgtcaatggacttattccggcacccttctatctcccgctctttgtcacggatcagcacattcaggctgtccctctccctctttttgccgtcgcagagcgtgataaccgcctggcggtcccgttctaactggtctacattttgctcctttaaaagctccagcttctgtatcagttttttcttttcacgctccttggctttgtagctgtttatgtcattcagccagtccatgtattccgtgggttcggctgagagccaggggagggccaggattctaagggactccctggccgtttcctccaaaggctttttcttttcctccaggctcgccagttcctgctccagaagacggatacgcctcctgacactgtccttgccgatataggcaaatttagtgtagttatccgggttgatgtgctgcaggcggaaggtgtggtagagcatgcagccgctggtgatgccgatacggcattcccttaattcatctatggtattgcacttgatgacctttccaagcagcaggtctgtataaggttttaagtaggactccctcacagtcacttcctctgagagggcgcctttttgtacctggggctggttctgggatgccttttccgtatccagcacagccacattgaagtattcctttttatccagttccccgtagatttccagggcggctctggcgtatttaggagataccaccagatttaatttattgtttcccagatagccctccaccgcgttgcgccactcatctctctttacgtccagcagatcggccagcacatgcacatccacgctcttaccagttttctccagaaggcggcgctggatgtagctcctggcattttccaggtatttgggataggctttgctgccagaacgaagtttttccagttcatctcttgtctgcttttcctgctttttgagctctctgacaccggcagcagcttcctgatgctgtttttccgtatctgtacgcatggataccatgttttttttcagtcgttccaatgtctccaggtcaatggtgcggttttcaaattcctccatatcccaaagggtctggttggaggtgatgtcctcttcctcccagcgctttaaggcggttgcggtctgctgccacctggcttcgctttttcccagctgttccaacagttcattcaggctcttaagctggcttttcagctcctcataccctgtggaggcaatacggcgcagcagctcgtcgctctgccgggtcagctcgccaatctgttcgtccactgagcttctggcctgaacctgctttttcaggtcctctcctgccagctttgccctgtcagccagggtacggacctctgactgaagctgcagaatctccagtttctgcacaaagtaggaacatttttcgatctgctgttccttgtcagcataggttaggaatctgtcctcaatctgttttaaggattggatttccgcacatgtgtcctctattttctttctcatgcggccgtactgcataacactttcctgcatgtcctcgatatggatgtcctgctccatgcagatatattcttttacaaaatcctccagtttgatgttcattctgaatgggatggcccgcttgaagagaagggggaatttttcagagtccaggccccccaggtaggaatcgtagagtatgcggcggaatcgctcgttgtgggaggtcaggaaataatcctcccggctgtaattcgcctgaagatagtcttctatttccacgatggacatggtccgtttcccgcccctgtagccattgtcccacatgggtcctttgtgccagaagaaacggcgggatatctcattggtggctgtctccacatcaaagacaattcccacgcactggcactggcccgtatcgcttcgtttcagttccaacacaatggtagaggaaaaattctgattgcgcagataggaaaactcgttgttttcaccgatatttaccatacctcttaagtattcaatcaggctgcggtcagagtcatcggcagccgccttgttgaagaagcccctgccgtccgtattggcatagagcacaatctgcatggcgtctataaccgtggacttgccgctgcccgaatgtccggtaaaaaaattaatttcatcattaaaggacagggtccttttggttatatagtgccagttattcaaacatatcctggaaagggcgagaaaacgatcgtttgctattttctgttccatggttctccttcctcagatgccatttcatcctctgtcatttcatcctgcgtcatctcatcctccgccatttcgtcctccgccattccgtcctccgtcattccgtccgtggcgtccggttcttcctcctccaaatcagctttcaactggactccgctttcatccgaatcatcctcaaaggaggaaagaaggcagcgcacatcgtctcccatgagcaccacgttgatgcagggatatataatcatgcggctttcgctttttaagtcctccagcagatccaaaggttctataacctggtattttttcaggagggtcactgcccggcggatttccgtgggagcgggctgcttcttgaacagcctgtaattgcccagcttttcgtggatttcccgcagagatgtatagacattgacactggtggaaacgctttccatctgttcatcgtatatcagcttcagcaccagcagatacagggtggccaggcggggcagcttgtctcccaccacagtttcaccctggatgtacatgacgcccatctggctgttttcgcgcagctccactccgctgatggcaaaataattcttcataaattccaggtgtttgctgcatacccggtaatctctgttgtactggaatcttccggtgcgcttgtcatatttgtgttccagtataaaggtctggcgccacaggagacggatgatttccgtcacttccatctgctccgactgcatcagattgtcgtagtaaggaacgccgtttccggtgtatccggccgccggcgcgatgtctgtcatgctgttttccaattccatgttttccactatcttgccctcctgacaaataccagccgcggataggtatagcctttgcagtgcaccatttccgaatcttcctcttccaccttataaggactctttctcctggtggaatagtcataggccagtatcagtttttcaaagtcctggtccgaatgtatggtttgttcgtccaccaccatttttccctctgtcatgctgccttctataaaggcttcaatctccttctggctgtaacggttcctgaccttgttcaggttcagaacttcctccatggacagttcctcggattcttcctcatcctttaactgttctgtaaagtctgccttggtcttacgccgtttgtacagggatttttctgacaatatggtcatctgggacaggttcatcctggcacttacatctgtcaggtcctcatccgggcagccgtattccgaaagatggtttaaaagcctgattacaagccccttcatgttgtcctcctggtttaacaggtagttgaggcgtgtgacggttgccttgacataacgggagtgctccttgtccatgttggagatgcggtgttctatatcatcgaacccgcgctccagctggtccagcttctccacaatatcgtattctgtcaggggggcctttttctggcctctggctgaagccgcgctttttgcgcacattttatttatccaggaactgtcctcccgcatggcggctatccaggatttaatatctgtcttgtagagataaaaattgtccgaggtctttaatatatgatattttttattgacgatttccgtcacgtatccttccaggtgctcctttaacagggtcccgtaatttttttgttccagcaggctgccaaagaacttatccatattgtgcagcatgtcctgaagggacttgttcagttttttcgtgtttatgagagccgtatttagcaggctgacgctggagcgggggtcgtttttcagagaaaatagaatggcatagacattctggatataaacctgggtctcatcctcatcatcgcctaataaacgtgaaaatgcctcaatcatcaccgcggcgtaatccggaatgacgatgttgaccgtcatgctggcgtaatcatccaccttgcggagccagccggtcctcaggagccagttaagaaccctggtggcaggcggttccagttcatcccagtcatcctcggtctcgtcctgccatatgacatattttttctgggagaaatattcacttaaaagctggatgcagacttccctgctgagaaagtaattgctgtactcatactcctcgttgattttaagaagtgcctctatgtaagtagaccggttgacagagcggaacaggctccagaaccggtctggtatttcattcatcagtatcatttacaaacctccgtatttccctatcattataacaggaaacaccggaagtgacaatcagaaatcattggccccgccatctcctgactcccggagccaggctttcagatatccgagaaggacaggctggatgtcaggataagtccagttggcgggcggttccctaaacagtgcggtgcgggctatctcatacccctccggtatggggcccagctctgtaatgtcgccgtaatagagcattccgtagcttatcccaggcgtatcagggtctccagcggtctcacggaccgaatatgcgcttaacggcgtcagggtgaagcccactgcaccggtctcttcgtataattccctgcgggccgtgtgttctatcttttcccctgcttccctgcggcctccgggacactcgtaggtatcccgatccctgtgctggcagaacagccatttcccctggtatctggacaggatgactgcaaacttcagcagggaatcatcctctgtgttgtgaaattcgacgcttatcatgtggtatcctccttatcaggaatgtacggcgtgtgtgattgggattgttataatgcttaaacagccagtctcccggcaaaggttttcattcgttatcatggtccagtccaaggtaaagaagcagtcctatggaaaaaaacaggatatgggggataacagaaaaggacatgcgccaaatccacaggggggctcccgggaataacggaagggggacaaacagccacagcatacagagcatgtagagtgcagctgtcagccctcccactacaaggagtttttttctcatgccggatttagctatccgtacagtgcctgccacattcagcacatgcatcaggctgacagcaaatcccacacttataagaggcatgacggatgtctgcagcaggatataaggcatggaattgtatgtcctggtttttagcacatccagatgccgtcctaacgctgtcagaatgaggtatgaggccagggtcaggatgccccagaacacggcctttttcaggtgacgctttctgacggcagacctggtctcctcatctgcaccggctggcatctgaccgtatatgactacaagaatatcggttccgaaggcacttgccagggtttccagcatatccagatccggctggctcctgcctgtttcccaattggatacggcctgccgggtgacgtgaatcttttgggccagctgttcctgggacatcccctgttcctttctcaattttacaatattctttcctactgtatttttcatagcggtacctccgggaaccattttataatagtctttgttctgaattcatattatctgctcttggttccggtgtcacgcaataatctgttgcacccttataatataaggctttttccatgcccggttgaatattattttaaatgctcctcgtatgacagcatccgttcctcgtagccgtccagtttccagtccagccttgccaggacttggttcagctcattgattcgggccgcaatttgttcccgctgttccagaaggagattctttctggcctggatggtggaagctccctgatggaacaatgtcacatattccagcaatgtctccacggaaacccctgcgctgcgcatgcacttgatatactccacccaatggcagtcatcctcggaataattgcggatgccgccggacgtgcggcccacatggggaagaaggccgatccgttcatagtagcgcagtgtatcggccgatatgtcatattgtctgctgacttctgcaatagtcaaaccttcatcaactcctttaccctgtaatcttgtatgaatcaatttttgtatgaatcaatacatctgagctcatatctgcggctgccaaggccaagagaatgggctgcctccaccgtgtgtatcccgttccgggattctatgcgctctataagggcagcctttccgtcatcctcagaagcgtatactgcatccacacacgcctggtccagggccacaggatctgcggatgcgaaaataccgatgtcccccatctccgggtcatggggatgggcgtcgcagtcgcagtccacggacagacggttggccacattgatgtacactatattttcacggcccatgtagtccatgacggagcgatccgcgtccgccatggattccaggaatgaatcgtggtccgctgtaaatacatcctcaaaccgggtgctggtgccggaagagtgaatccatattttgccgtaagaggatgcaagcccaatggacatgttctttaaagccccgccaaagcctcccatggcatggcctttgaaatgagaaagcatgagcatggaatcatagttttgaagatgggatcccacataattttccgtcagatgatgaccgcctgttaccggaaggggcatatggccctcctcgtccaggatatcacagggagcaatggctgtgaacccatggtcccgcatggtctcccagtgagctttggaagtgttccttcttccctcataggcagtattgcactccacaatggtgcccttaagttcctgtacaaggttcctgataagctccggctgcaggaaattgcggccgcccggctcccctgtggagatctttaccgctgcgctgccggggagcgagacacccaatgcgcggtaaatccggaccaggctttccggcgtgatttcccttgtcatgtaaacaatagacatattgattgtcctccttgaaatgttgttgttaagctgtaatgagagtctacaacttaaagtcaactccaagtcaagagaaaatgaggaaaattgacctaaaatataatattaacttcttgtttcaccaactaaattcgtgattgacgatttcagtcttacacagaatgtgatatgattctcttggtaagtggattcctccattaggaggattattatgcctaagaaaaaagaatatgatcacaagcacctttcaaccagccagcgcattcacatcgaaaaaggattaaatgacggtttgtcctttgctgctattgcaagaaaactagataagcatcccagcaccattgcaaaggaagttaaaaaataccggacgcttcagcctcgcgagaaagacccgaagaagccggccaggtgtgccctcttcaaagagtgcaccctgcgtttcctttgcgataaaaaagactgtgtaaagatgtgtaagagctgctatgatgtaaagctgcaggtttcaaaatgcagctatctgtgttctgaataccgggagcctcaatgtgcctctatatctaaagcaccttttgtgtgcaatcactgcgcaaggcagcggacctgcaataaggaaaaagcctactacattgcccagaatgcagatcaatcctctcaggagctgcttgtatcatgcaggcaggggattaaccaggctcctgccgatattgcaatgcttgatacgcttatctcaccattgcttgcccagggacagtcactggcgcacatttatgcctttcacggacacgagattccttgttccagaaagacgctctacaattatatcgatcagggtgtttttactgctaaaaacatcgatttacgccgcaaggtacgttacaaatgcaagccaagaaaaactggtacaagggtcagcctggctgcaaaagaattccgtataggacgaacctacgagaattttcaaaaattcattcaggaaaatcctgatattccagttgtcgaacttgataccgtagaaggcggccgggataacagcacgcaggctttccttaccatctttttccggaactgttcccttatgcttatttttgtgctgcaagagaaatcacaggaccaggtcataaaagttttcgactatttgacagaaaaactcggtattaaggtttttcaggaactgttccctgtaatcttgactgataatggtgtggaatttcaatttccagaacgattggagtgtgataaaaatggtgaaattcgcaccaaaatcttttactgcaatccgaactcttcctggcaaaaaggacgtatcgagaaaaatcatgaatacatccgatatgtgattcccaaaagccagagtctggatcactataagcagagagatgcctgcgtacttatgaatcatatcaacagtgaagccagagacagcctgaacggctgcactccattcaggctgtctaagatgcttttaaataacaggttacacagacttttatgtctccaggaaatacctggcgaccaagtccacttaaaaccatcgttacttaaaaaatagaattagaatcaagacggaatccactgccgaatttaatcctacaaaaatttggcatgtggaatttagtcttgcacacttacccagatgcctgtttgccatgcttgcacacatgaaaacaggcccctgtaaggtcattgtaactctatttttgtcactcgtaaaccgaaatgaagcgaattaggtgctgcaaaatcaatgttttgtagaaatcacgaattcactctgtaattttaccatgaggaaaattgacctaaaatataatattaacttcttgtttcaccaactaaattcgtgattgacgatttcagtcttacacagaatgtgatatgattctcttggtaagtggattcctccattaggaggattattatgcctaagaaaaaagaatatgatcacaagcacctttcaaccagccagcgcattcacatcgaaaaaggattaaatgacggtttgtcctttgctgctattgcaagaaaactagataagcatcccagcaccattgcaaaggaagttaaaaaataccggacgcttcagcctcgcgagaaagacccgaagaagccggccaggtgtgccctcttcaaagagtacaccctgcgtttcctttgcgataaaaaagactgtgtaaagatgtgtaagagctgctatgatgtaaagctgcaggtttcaaaatgcagctatctgtgttctgaataccgggagcctcaatgtgcctctatatctaaagcaccttttgtgtgcaatcactgcgcaaggcagcggacctgcaataaggaaaaggcctactacattgcccagaatgcagatcaatcctctcaggagctgcttgtatcatgcaggcaggggattaaccaggctcctgccgatattgcaatgcttgatacgcttatctcaccattgcttgcccagggacagtcactggcgcacatttatgcctttcacggacacgagattccttgttccagaaagacgctctacaattatatcgatcagggtgtttttactgctaaaaacatcgatttacgccgcaaggtacgttacaaatgcaagccaagaaaaactggtacaagggtcagcctggctgcaaaagaattccgtataggacgaacctacgaggattttcaaaaattcattcaggaaaatcctgatattccagttgtcgaacttgataccgtagaaggcggccgggataacagcacgcaggctttccttaccatctttttccggaactgttcccttatgcttatttttgtgctgcaagagaaatcacaggaccaggtcataaaagttttcgactatttgacagaaaaactcggtattaaggtttttcaggaactgttccctgtaatcttgactgataatggtgtggaatttcaatttccagaacgattggagtgtgataaaaatggtgaaattcgcaccaaaatcttttactgcaatccgaactcttcctggcaaaaaggacgtatcgagaaaaatcatgaatacatccgatatgtgattcccaaaagccagagtctggatcactataagcagagagatgcctgcgtacttatgaatcatatcaacagtgaagccagagacagcctgaacggctgcactccattcaggctgtctaagatgcttttaaataacaggttacacagacttttatgtctccaggaaatacctggcgaccaagtccacttaaaaccatcgttacttaaaaaatagaattagaatcaagacggaatccactgccgaatttaatcctacaaaaatttggcatgtggaatttagtcttgcacacttacccagatgcctgtttgccatgcttgcacacatgaaaacaggcccctgtaaggtcattgtaactctatttttgtcactcgtaaaccgaaatgaagcgaattaggtgctgcaaaatcaatgttttgtagaaatcacgaattcactctgtaattttaccatgaggaaaattgacaaaattaagcgtaaaatgctgttatatatccaaaatattctcaaatgccgtgaagagcaatcgaatccaacaatcagctcccgcccttttcaatgtccctgatatggaatctcaccacatctgctccgctggaatccgaatcgcgtatgacatcaatggctgcttccagacggacatccggctccaggtattgaggggccgtcattccttctattataaaaccaggagtaaatgccattgtcacgggctgattcggattaaaggccacaaaatccgtataaatgacatcccggatgcggctgctgtccaggtcctctaagggtaaggatacgattttttccgactcatcgtagaatgtgaccatgtttttctccttgtcgagtttataggacaggcgccggtccagctgtttttcatagtcctcttcccggaattcatatggttccagatgtcctgtgtcatatcgcagaaaggcataaaattgctctctggacagggaagtgccagtcatggtatgaaaggaggctttcaatatgccgttctcctggtcccatcccattttaggaagaatcaaccgaggagaagtatagggaatggagggaaatgaattcatgttgccctcccagtccgtgatgtaaataccgtcgtaatgtcctgccggccctgcatagccgtagagacggaatttgttctgggaaagggctgataaaaatactattccctgcgcatcaggcgcctttccaagttcttctaaggatacaggctgaatctccttctgcgcaaaggcttcctctgttttccagaatccttcctccgccctgcctgtcactgcggctgtatccctgtcctctgttttaccggttttatcctgtccctgtccagacaaggcgccggaaacttcatcgggtttacccgatgcttccgtctcccctcctgttgtttccgatgatttcccgctgccggttaccaccctgatgccatagatacggttatcataatcactcatatggacgaaaccgtcaatgggatccatggctgtgatatcgagagtatccttttccgtacccgtaagcataatccagtgcacggccccgcttttacgctttacctttacaatgggatacattttttcatccagcaggcggttgatgctctcgctggtggtaccgcagtccaggcggactctggcatagggcaatgcctgttccagttccttccacacaatggctccgcggtcattataaaccttattttcattgaaaatctgattcagttcccccggcgaaaaactgtgcactccctgagcggtcagggatgcagcgatgcagctggtcagacatccggaacttcccatggtgtcctttgaactgcccagaggattgctgctccagcgcgtatcatgctgggaatacgaggtatagattttattatccacagcagcttcgtggtaatccatcccggctataacgctgccagtctccctgtgccttgtcatgaatacagccaggacggcagctaaaaccagaatgccggccagggctgacacaatcatgtatctgccctttcccagcttatgaggtttgttgctgtttggttctgtatcctgtctgtcctcctggttttgtccgtttttttcttctgttgttggttccatataaaatgtttgctcctccttacctgcccctttatctgtttccaaaccgggataatcccgccaacggcctttgtcaaaagtatagcaggagaagcaagaaaagtctttgggcactccttacgatttattacgattcccgtaccagttttcccactgttcacggctcccgcaatacacattcatatcaatgaatgtctcctctccctcatatcccccaagacgctggcggttggtatactgccacagcagccatggttccccctcggtgcggggctttgtttttacgttgcgaatccagagcggataccggtcaaaccttccgcggatgtacaggttccaggattcctccgtggcatagattatagggactatcccatactgtgcttccagtccttccagcaaggccccaagctcctgctccacctccaccggatttggaggattggcagccttgtcaccataaaactccacatcaactgccggcggaagcatcccttccctgtcaggcagacattggatgaaatgcgccagctggtccttcccgctgctgtcaaaactgaaaaaatggtatgctcccacagccaagccggacagggccgattctgaccaattctgagaaaatttctcatccacatgggaactgccctctgtggctttgatgtaagcaaaatcaatatcctgctgtcccagcacattccagtcaatttcgccctggtaatgggacacatccacaccccgtaccggataacgtgtttttgaaggattgtttaagagaatccgtccgttccatatcagataagccatgataccggcagcaaaaaccgtcatgacaacgagagcggccagtatgcggagccatttgtatctgtgtttcatgtgaagtcctgctttcctgaaccccaatccgtattgctgaagctgtttcagtaagatatcagagggttcatcttttatcattatgcattacctgtcctggcttttcaagtaaaatgaacatagaaattgaacggttttccaaaaaatccgctgccggcatcttcggatgggttctgtttaaaacacaataaaaggatgcatgttctctttacagagtttgcatccttttattgcagataaacaatgcggcggtcacaccctctacgcagtcacacccttgcccggagctgccttatctgcctctgtatccttatccaaaagcttgcggatgccctcaaaggcaacaatcacgcccagaatcagaagaagaactgcgaacaccagctgaagcgcgttgccgaatacaaactggcttgacagggccgatataaggtccttgattttaaggctcagggccgtaaaggtgacgccaagcatgataaccatgggcccccagagcatgacgccctgtctgtgtgtttttttcaggaatacggcacaggcaatcagggccagcgcggaaagcagctggttggcagagccgaacagaggccagatgctcgcgtaacctgccctggataatgcgtagcagagagccagggtcagtatggtggagaaatatttgttagtcagcaccttgttcagggaactctgccttgatgggtcaatatcgtcgttggtaaaaaattcctggaaagcaatacgtcccacgcgcgccacggaatccaggctggtcagggcaaaggctgaaatggacagcgtgatcagtgtatagctgatggaatcaggcattcccaatgtggtaagaaacatggcaatggccttggcaaatacctgtggaggtgttccggttggaaggccttcactggtagccagcgcaccgacagcaatcagcgcggtaatggccaaaagactttctaacagcatggcgccaaaggataccggcagcatgttcttttcatttttaatctgcttgctggctgttccggaggataccaacgcatggaagccggatacggcaccgcaggcaattgtaacgaacagggttggaaacagataggaaatatttccctttgcatctgtaaacacaaatgatgtaaaggagggaaggttgatggccggattataaacacatattcccagaaccgcaccgataatcatggccagcagcaggtagctgttcagataatccctgggctgaagcagagcccatacaggagtcacgcaggcaacaatcacatacaggaatacgaaaatgagccatgcgctctggggcacatagacgggaaatgccagtccaagggcgacagccagcacaagaagtccgatggcaaccagggtatttatcagcttgctgcattttccatacttcaggaagcatcccagtaccactgcaaatgcaatgaataaaagagatgtggtggcaacggctccgttagcagcgattctctcgcctgtggctgcatcaaaaccattgaatgtgcctgccacaatgtcagcaaaggccgccactaccaggatggagaacagccaggtgaataaaaggaacagccttttgccgagcttgccgatataaacctcgattatgtagccaatggaacgtcccttgttcttgacggaagcatacatggcggcaaagtcctgaaccgcgccgaagaatacgcctcccagaagaatccacagcataacgggcagccagccaaacatagcggcctggatggggccgttgatggggcctgctcctgcaatggaggcaaactggtggccgaataccacgttggtatcagccggcacatagtccacaccatcctccatctcataggccggggtctttgcatcggggtcaacgccccatttctttgccagatatctgccgtaaatcagataggcaccgcctaataccactacggctaaaagcatcataactaaaccattcatcatcaagtctcctcacgtatataaagtaggtttcaaagagtttgtccgggaaatgcctctgcgtcctgcttaagccccctgcactgaaaagaacaataaccggccctgtaaaaagaaaaggtccctgcaccttgcgatgcagagacgaatcaatccgcgttaccactctgtttgccgccccgtaaaaggacagccccttaagttcctgctgctctcagtcagccggaatctttgttaacggaaagaaacccgtccatccctactggcctttctctcgggaaaggggttcagaacagaagctgttgggtgaggccatgattcctctcgcgcgcccttccaccagccgggctgctctctgtgccggaatctgaaaccatgacatgtcccagtcattgcttttctcaagtatcaaactcttgatgtcaagaagtttaccactttaacacagagaaatcaatgatattttaacactttttttatactttatttatatatttttcataactacaggttatacggatgcagaaccttccgcttcgcgggatatggcgtcatctgcaatggcctgcaccagcccctgtatatggtatgttccggcagtgatatctgcctttattccatgtttttttaactcccctgccgttatgtccccgatgcataccagcctggtctgtcctgtcctttgtccgggatttatattcaggccgcttgaaagataagcccttacaccggacgcgctggcaaaggtgatatagtcaaatccctcttccgcctgcctctgttcactcaccagcctgccttccacctggtaaagaacaatgtcatcgtaaacaagtccggctttttccagtatactggtcagtacaggtgatccgcctctggagcgggcaatgaggatgcggtcgctgtctgtaaggatggatgccagtccccgggccagtgcctcggcacagaaggaatccggcatatagtctgcatggaaaccgaagtttgccaattccctgccggtgccgtcgccgataacggcaaattttatatgacccagcaagcggtaatccatgccggagtgctgcatttcctggaagaacaggcgcacaccattggcgctggtgaatatcagccaggtgtatgcagccagatttcggtaggcttcctgcatggcagggcattttgtatgggatatcactttcatctccaggattggtgagacaaccgctccctcctgtttaagggcatgtccaagactgtctgtaaaatgccgtgtgccaaccataccgattctgtatccggccaggggaccaaaagaacggcatttcaaatcgcatttcatatcaaaggaggctgtttcgcccacaacaataatggccggagtgccgatccccgcctccattaccttggcgtgaatcccggaaagcggcgcccggactgccctctggtccggcagggtgccgttttcaatgacagccgcaggtgtgtccggagccattcctccctcaatcagcctggctgtaatggccggaagctgtcccaggcccattaagaataccagggtacccggcagggaaccgtatgtttcaaactcaggagggagacaatcctctccgtcccgggtgtggcctgtaatcacatggaagcttctgcttaccccgcggtgggttacgggaatcccggcgcattccgggaccgctatggcggatgttacgccaggaacggtttcgtagggaatcccgtgggcctccagtgcctggatttcctcgccgccccgcccgaacacaaagggatccccaccctttagccggaccaccgtaagccctgaaagagccagttccaccagaacggcgtttatctcatcctgtttcatggagtgatgtccggcctgtttgcccacatagattttacggcaggcggagggcacccattccaggaattgtctggatgccagatgatcatagacaagggcgccgcaggaactaagaagcgcctggcctttcagggtcatcagggccgggtcccccggacctgcgcccaccagatataccattcccttattctccatatcacatcaatcctttccatgcttctgacgccagtttttctatatccctccgggatgtaccgccggtcaggtgaatccgctttacctcttccctggggctgctgatgccccatacctccaactgcccgttttgaaggacagagtagatgccgatgggctcatgacatcccgcatccagctgtttaaggacgcttctctccagatccaggcacagccgtccctgggcatggtccatggcctgggcgagactgtgggccgcggttcctgcttttgcctccaccgccatcagtccctggcctcctgccggtatgaattcttccggagccagaaacgtatattcgtaggtatcctgttccagcagtcccagcctttttaatccggcagccgccaggatgataccgtcaaaattctcctcttccagtttcctgagccgggtgtgaacatttcccctgagagtgctgcattctgccccggcagcctccggccacagtgttttgcacatcaaccgggcctgaagctgccgccttggactggaggtgccgatacggaccacgctctccggccggatcctatggcctctcatggtgaccagcacatcccttgggtcttcccgcccggataccgctgcaatggtcagtccttgggccagctccatgggaaggtccttggcgctgtggaccgcaaggtctatgacgccttcctgtatggcctgctcaaactcagatacaaagacacccttgcccccgaattcctgtaagggcttgtccagtatccggtcccccagggtatcctttgttacgatttccacctgtatgccaggacagacctgccttaattcatcagctacaagctgtgtctgaatcagcgccagtgcgctttttcttgttccaatgcggatgatatcattcatgttcctgttccagctttctgtttattataatttgcgcctgttcccgtgtgagacagccgttatggctgagtccttcctccgccagctcgtaaaacaaggctgaacggaccctgggcgagtcagggaacaggtctttgaccgtctctctgtaagctcccagccgggttgtcagctctcccaggctgtccggcattacggaccggattctggccttcaggtacctggctatgacagggctcatgccgccggtggaaattcccaccaccacaggtccgtcccgtacaatggacgggaagataaaggagcattcctcctttacatccaccacatttacaggaatcctttttgacctgcacagtacggatattctgctgttaaggccgggctcagacgtggccgcaatgacaaagtcggctctatccaggtccctgtcctcgaactctcttctggtcagcttgagagtgtccgtgtatgcgatgtcttgcgccatctcatccaggccaggggacatgtccggggatactacctcgatgaccgctccatagggaagcagatcatgcacctttctcagggccacgcttccaccgcccgcaatcagccatctcattccctcaatatctgcaaaaaacggaaaatatgccatgaagttcgctcctcccattctatccccggacagagccgtccgggcgaacgtaccgaaaaagacgcagacagccattcacaaaacctcctgtctgcgtctctttcctgctatttttatctgcaacatgaagaaaatcagcgcatgtcatgctgctttcttcgttcatctaacagacgttcaaaatcctcttccgtataacctatgtccgccagacgctgtctgcgcttttccctgaggatacgctggcgttcccgctccgctgcctgccgtcttttaaaccagaatactccgccgccggcaatcagcgccaagaccaggacagccccgccgcctatgagcactgcccttggaagcttaaggccggtttttccgtcctgtccgtccttttcgggctggttttcctggggcgtatcctcaccaggctcggagggagttgcgttaacagcctggaccctggagctgtaaatccatgcatctccaactctccgctcattataggtgtagaccagcctggccacggcctcctggggatggtcctcaggcaaatccgtctccagcgccttgtccgcatctgtaaactgtgcgtcattaggtaaggtgataaccgccccgctttcaatggatagttccgatggatcatatgtctccccggcaatggttacaggcgtgtctcctgtgacatattcgatttcattgtcagctatgttcacattcttgaattttgcaaagcagaaatccagaatggtctttgtatctgaataatgggttttctgggtactcttaagggtaactgctatctggcctctgccctcccgtctggcataggtgacaagggtctgtcctgcctgggatgtccagccggtcttacctgcaatggcatcgggataatagttggaatcatccgacagcagcattttatgctcaatggaaaaagtccgcccattggggttgttggcagtggctggtatagtagaagttctggctgaggcaatctccagcacagtggggttctggaagcaggccctggctatgatggccatgtcgtaggccgtggtgcgctgggtgtcgtcgttcaaaccggatggattggcaaaatggctttcattacagccaagctccgcaatccgctggttcatcatatccacaaaagcctgtctgcttccggccacatactctgccagagcattggccgactggttggacgactggaggagcatggcgtagagacactggcggacgcttaatacatccccttcctccaggttgaacttgttgccggccccggattccacattgtatatggcgtcatgggaaaatgtgaccggcgcgtccaggtcattggtattttcaatgaccacaagggctgtcagcagcttggtgatgctggccggaatcttctgctcatgtatgttctgggcaaacagcacggccccggaatccatatccatgacaatgccggcctctgactgaatccctgtgtctatgggccagtccggttttgcgaaggcggtgatggtggccattgaaaagaccatgattagacttgtgattatgtaggatatacgacgcataattacctcttcttttttatcaaaataaaacagcctacccatgattatattttaataaagggccgctgtcaatgaattaaaattactaattgtatctcgttgaaaaacgaatcagccatgcagtgggaattgcggtctactttaaatggcatatcctggaagcagtgccattattttatacatcactggaggtaaaaaagagcatccttctgaatccctgtatcatcaccgtatacctgggaattgtccgctggatgtccggatttccggttccggatttatagacacagccattgccaatacaggagacgtcacggtacgcctcataacattggcaacggcggccttctggctgccaaatgcggggccatgaggattatgcgctgtattgtcaccaccgccatcatgtccctggcagccattccggttctgatgctgtctttatagggatacatacgttgttacaatatatccccggaagattttgcaggctcagaagattcagaattcccgtcttccgctgcctcccccggaatatattcaatatggtatttattctttccgtttgcctttgcttgatacaaagcgtggtcagccatcccaaacatctcctcataggatatattgccggtcctgcccactgcaatgcccatgctgcaggtggcattgaaatcagggttatcctttaaagccctatagacacggtccgcaaaccgtgtcagctggtccgcatctttaatcccgcccatgaacagcatgaactcgtccccgccaattcggccggccacatcatcctggcgcacacatttgtgtatggtatcaccaaaggccctgagtaccacatcaccggcctgatgccccctctcgtcattgatgtgtttaaagtcatccaggtccaggataaacagggcacatatgtccccttgtgcatgttccagacaggcgcggcacagctcctccgtggtgcttttgtttttcaatccggtcagggcatcagtctgtgccttgcgcctaagcagggtctgcatggcaatagcagccttcagctcctcattcttcttctggagaatcagattctgcagtttctgatggcgggcatcgtaacgcatgaacaggattcccactcccagcagtgaaaccgctataaccccaaaggcaaaatataagggataagtctgtatgaagtagctgaagtccttgttttccttgcctgaaagcagggttgcatacacagcctcatccatagccccctctcccgcctttgcaatggatttggagaggacctgggccagcaggggattggcactttccgagactcctatgtaaacaggtgaaacagccgtactgccgtccatcaccacaagattcatgcccagaagattccggtccgccgacagcttgatggaggataccatggcacagtcggcatttccgttttccaccgctgtgagacagtctttaggggtatcataggtaacaatctcccatttgggatacttgtcttccaatacctcctgcaggccgtccactttttctaccattgcaatccgctggtaggaggaaagattcagaggctcatcctttttacctaccaggctaaaactgcagttatagtaggggatggtatatttaagactgccggacattccgcttcttttctgcttaaatacacttaaacgaatctgggcattttctcggaacaatttatctgctgaagcctcttcctgttccagtggaatgaactcaaagttcaatccgctcaccttggaaaggtgcctcatatagtccacgtaagcgcccttgcatgttttttccttctcgtcataccattcaaaaggatagtcggaccgggccaccagcactgataccggcccgttctgtttcacaaactggctctcctcccgggtaaactctgcaaactgccggtccatctcatggtaatatttttcataaagtcctgccgagtaatagggattatctatgaaaatctgcttcaatgccttgttcagccgcaccatcagcccgggcttatccaccgacgtgatgaagtaagccggcatatagtcaatcttggccagaagcttctggttcatgttatattccatattgccgttgataatggcatccacatcctcacgctccagggcctccagtatctgggtgccggtatcatagtatacggctacataggaaaatccatgattctctgcatattcgtcaaataaatcattcaggaagttacccttaatcatgcctacccgtattccctggaacccgtggtaatcatcataatacagacgttcgtccgacttgcgcccaaccagggcggcaaaatcaaaacagcactcgtagctgctgaaaaggaaatcctctgcccgctcctcgctgtattcagcagggagcagtaaatccagttcccctctgcgcagcatatccaggcactccccccagggcgcctggatatactcatattcccatcccgtatattctgctattttattcagataatccgccccatatcctattgcatagccgtcctggtctatctggatgaaatccccgatatccacacagcctacccgcaccttctccgctgcctgcacaggcaaggctaaaaaaaggcacagaaggaatgatgacacaatcaggaaaatcctgtatttagccgccgccaacttcttcatcccatcacccacaggttataatttgtttgttctaacaatatattgattataacatgcaactatggaggattccagtagttcggcttaaattaagcattgatttctttcaacttccggaatatgtcttccagcctgacatatgcgtcacggtatacttccataacctttatagcgcaaaaaaaggcagaaggccgaaaggcctatctgccggttaaggaagtacataatggattaatagatcaggatcaggttattacaacagtttaaaaaagcacaaatcagtccagacgcgccttcaaaagctccagccctgccagtatcacgccgcccagtaagaaaaacaggatgctgaaggtggacggactcatgggcgccctgggcacatccagggtggttggccccatggtgatggcatagagggaacccgtcatcaggccgatgatggtgtaaatggtttgggaacggtaccgctccaggcacatcttgatgattttaatgattcccacaatccctgtgacgacgcccagaccaaataccatcaggatggggaaatagtccatattcatgtgcaggaattccttcacagcacctatgatgggcacatagagcccgaatatgagaagaagtgtggaacctgagatgcccggcagcaccatggccgtaatggcaatcatggctgtgaagaatacatacaccaccagccccagtgacagatgctccacagatacactgatcccctcgccgccggagggattaaaataggtgatgcaaaataccagcagaactcctataagggtgaatacaatatttccgtacctgtctttaagaacttctttttcctcacggatcaccatgggaatggcgaataaagtcagtccaagaaacagggagctgatccggtagatgtgaacctcaaaaaggctggacagaatcagaaccgacatgcagaagccgatgacccatcccactcccagctttaccagaaacaaaaaggcagccttccttctgccgttgtcccggcccataaggtcgttcagggattcaataaatgtatcataaaaacccagtaaaaaagcaatggttcctccggatacccccggaacgctgtccgccagagccatgcaaaaacctcttattccatttaaaagcacgtatctttcctcctgtcattttactgccttccggccgcaccggatgtcagcatgtttttctctgaatcattatacaggaattgacagaaaattcaagcacggtttttcattgacgtttctgtgatcttatattttcttccttccctttaatttgttcctgtggtatcatagtaataatttaaattgtgaaaggaagggaaatcccatgtatgaattgattcaggccggtcccagaagtttctatattaacagtccggtcaaaataggtgtgtatctcattgatgatgagaaagtctgtctgattgacagcggcaatgataaggatgccggacgcaaggtgcgccagattctggaacgggaggaatggtcgctccacgccatcatcaacacccattccaatgcggaccacatcggcggcaataaatatctgatgcagcagaccggatgcaggatttatgccagcagcatggaagctgcgtttaccagacatcccatactggaaccggcctttctctacggcggctatccgtttaaagacctgcgccataagttcctgatggcacaggaaagcgatgtcagcgatgtgtcccggctgtcagaggaccagctgctaaaagacctggaactgattccccttcccggccattttttccagatgataggcattcgcaccccggatgacaccgtgttcctggccgactgtctcagcagccgcgccaccctggaaaaatacagggtctcctttatctacgatgtggcagcctatctggaaaccttggataaggtggcatccatgaaggcaaacctgtttgtaccggcccacgcggaagtctcttacaacgtggcagctctggcttcctataacagggactgcgtcatggagataaaggaactgcttctggagctgtgccgcgtccccaggacctttgaaacgcttcttaaggaagtctttgaccactatgggctggtcatgaccttccagcagcatgtgctggtgggaagtacgatacgttcctacctgtcctggcttaaggatatgggtgaaatggaggcttacatagaagaaaactgcctgtattggagaagctgacaggcagccccggtttcacaggtactcctagtatcacaggcaggctctatataaggtccatgaagctcagctgctctcccgctcccttgtcctcgaatttctgaagataggcaaagagcttattgatatcggtttccatctgccgttctctgcaaaggcgcttaaaaaacgccataagctcttttttgcgggggcttcccacctcataggcatttccgtacatatccatgtactgttttttcaggcccggataatgttcatccagcctgctgtaaaaatattgtctgtctccatcccttaaggtcactccaatgtcaaaggccaggatgccgtggaccctggccctctccccgtactcgatgataccctgaatgttttcctcggtgtcgttgatgaagggaaggatgggacacatccagataatggcgggaatcccctcatcccgcatgatctccagcacctgggccctgcggctggtggtgcatacatggggttcaattatcctgcactggtcttcatcgcaggtggtcagggtcatctggaccacgcaccttgtcttttggttgattcgcttaagcaggtccagatcccgcagaatcaggtctgatttcgtcaatatagagactccgaacccataatgttcaatgatttccagacatttcctggtaagccccaggctgcgttccgccggcatatatgggtcgcacatggcccctgtgccaatcatacaccgctttctcctgcgtcttaaggcctgctccagcagctccgggccgtttatctttacctcaatgtcctcaaatgcatggtccatgccgtagcaggtgcttctggaatcacagtaaatgcatccgtggctgcacccccggtagagattcatcccattcctggccgacaatatggatttggcttttacttcatgcatttttgcattcctctccctgatgtcaccacactgtgaccagtccgatttgttcctgtatcagttcctttgcacggttgaaacgctccagatatgtgcctccgatacagtggtacttcaccctgtaccggtctaacagttctttaatccgaaggctgcatccctccctgtcctgccgtatcttttcattgcgtgtcccgtcctggataaattccacatccggttccagaaacagcacaagatcccagcggtctgtctcatgaatggcttcagccagcttcgtacacaccgttaactccttttgcttatctcctaaaagaaaatgactgtaaaacaaggtggttacggcgtctgtgtccacaaacaggattcggttgctgtgtttggcagcctccatcacattgattttctggcgcagcaggttttcgtacagatcctccgctatcatcagatcttccccgcccgcataatcgcaggtatccctgccggcctcactgacatagttggtattataggccagtgccagattccggaccagggtgctctttcccgtgctctcgctccccagaaccagcacacgccgggcatagtaatcccgacacacagagggaatgtaatcccagtgtcccagcgcccaggcgcggatgtccgtggagcacaccggcacctcgctccggtcaaagtaaatcacctggctctcaggtccgtacagagcctcgaaccggcctgttcccagataatctgtcccgcagaacacagcgtcaataggctttcctatgactgcctttatatccctggctccctgttcccagtaccccggtgtatcatattcctccttggtaagggcctggtcctccaccatccgtatcattacattggaaagatgtctggtactgtttaaaatccaccggtagcgcatctcctttgaggtggactcccgtccccggcaccagctgataaccacatagagctccctgcacatggcggctgcccggatgatatcgtggatatgtcctgtgtgcagggggtcaaaggatcccccgaacattcccgtcttatacttcattgacatgttccccgctttccctgaaccattttacaaacataaacatggcgtttaacagatagatgcaccacatcagtaaggtggcgatatcggtcccgcccttctgataatccgcaaaccacatgaatacagtcaccacatccaccacaatccatactatccactgctccataaggcgcctgacgctgagaagcatggccagcacagacaggcaggtgctcatgctgtcgataaaggggaggtttccgcctaatcgtttcaataccagcccgtagccgcagatggagacagcggacaaaaccagaagtagtatctgtcttgaaacggtaagcctggttttctccacttcctttgtcttaccgtccatgtgttttttccacatgaaccatcccacaaactgcatagggacatagtagcaggcattcagcatgacttctccgtaatatttggccccaaatgcaatccaggcatagagaactgtattcaccagtccgaacagatagcagctcatcttgccctttccggtcaatatgacgcagagcacaccggtgagggccatggtaatgcccagggtgtcgtcaccccagtgtacggacagggccgtgatgacggtgcaggcagctgccagccatataatctcccaggccttccagcctgacaactcatgtttcagaaatctccccatccccgttccccttcttgtatgtttttagcggccgcagccctttacaggccacgcatcctatatagatcagtcccatatatcccacaaagggataaaatacattgattaagcggctgaatggaagcattcccagcaggaacgcaaatacagtcaccgccgctgcggccatcctgtttctgccgggcgcagagaatgagaaacggctgcagaccgtccacatcatggtggagcaggaggaaaacatacccaggacaaggacaacggaaaaaacagcgcccagcacattggaaatatgtctggccagatacagagtgggaatcgccagggacgcggcatcccttgagtgaagcaggatggcggtattcatgatggcaatggccagtatcatagttaaggcgccccatacagccccccatttggcttccttcctgctgcgggccgtcatccccagagccgtaaaataggtgctgccgctgagaaagttcagggatatgtaaaggacagagctgataagccagttaggcgctgaccgtgacgcccccagcacagtctcatactggcggatatgggagagatttgcggcgccgcggattacggttgctaaccccaccataagggtgaacgcgattatgacaggaccgatggtggatacaatacgtaccattttttcaaatccggtcagatacgcacacaggaccatgaccgccattatcatggaacccagatatctgtttattccgtaatactctgaaatcgtggcccctgctcctgaaatcagtacagccataatcatgagcagcgtgaccggaatcagccatgaataaaactttcccacattttttccgcagaaaaaagtgaagtggttgaaattcacctcttccctgtgggcatatcctgtggtaagcaatacctggcccaaaaataaaaagccaaggagattcagcagcaccacaccataactgtagtatccgtaactggtaaagaactgaagtatctcctgacctgtagcaaagcctgaaccgataatccaggcaataaaagctcctgcaaacgtaaccacatttcggatgctgcacctgctgccctttcccttcattcctgttccccctgtatccgcacctgattttgttatattatagcagaaggcacataaaaaatatagcattgaataccataattcatattcaatgccatatttatctactatttcatctcagattataatttctgttcttttactctccctggagcgcgtcatacccctgctctccggtacggaccttcactacattttccacttcgtatacaaaaatcttcccgtctccgatattgcctgtgtaaagagctttcctggctgtctctaatacatcctccaccggtaccttactcaccaccacttccagcttcatcttcggaagaagggctgcttcctccacctttatgccgcggtagtaatttacatggcctttttgcgttccgcagcccatgacctgcgtgatggtcataccggtaactcccagctccgtcagcgcatccttaagggcggtgaacctggactggttgaatatcaccaccaccttggacagcttgacactagcggataccggctttaccgaagggtaatgctccaccggaactgccttttcaacagggacacctgtatctgctgctccttcctttgcttttcccataaataccattggcatgaaatccgcataggagctggccagattgtgttccgttacatccagtccctttgtctcctcctcttcactggccctgagaccaatggtatgcttcagcacacgaaaggtgataatcatggtcacgcttacccaaaggataacggaaacaacacctaaaagctgtattcccaggaaggagaaaccgcctccgtatgcaaggcctccatccaccgcaaagacgccggtgagaagggtgcctgcggccccgcacatgccatggaccccgatggcacctaccggatcgtctatcttacacaccttatcaatgaattcaatgccgaataccaccacaaaggctgctatgagtccgataaaaaacgcgcccgccgggctgaccatatcacagccggctgtgattgccaccagaccggccagggaaccgttcaatgtcatggagatgtccggctttctatagcgcagccaggtgataatcatggtggctacggtggctgtggcagccgccaggttggtggttacaaagatattgccggcagaatatacggccgcgtcactgtccatggctacggtggagcatccgttaaaaccgaaccagcagaaccacaggatgaacacgccaagggcgccaagggtaaggctgtggcccagaatcgcgtttggctttccgtcctcagtgtactttcccatacgcggtcccagtaccctggctccaatcagggccgcagccccgccgcacatatggacggctgtggagcccgcgaaatcgtgaaatcccatccgggccagccaaccgccgccccaaatccagtgtcccgacacaggataaaccactgcgctgatgacagcgctgtagatacagtaagaaataaatttggtgcgctccgccatggcacctgatacgatggttgctgccgtggcacagaacacagtctggaaaatcagataggcgggaagaggaacaccggccggaaggattccggaataatctccccgcaccagcggatcaaatcctccaataaaagcccccgctcctccgaacatgatgccgaagcctgtaagccagaacaaaggggtaccaatggcaaaatccatcaggttcttcatgataatgttgcctgcgttcttcgctcttgtaaagccggtttccaccatggcaaagcctgcctgcatgaagaaaaccagggccgcgcctaacaggacccaaattgtgtttaccgctgaaaattccatcatacattcctccttgaggttttatttttgttggggatgcgcattcatgggggaatacgcaaaaagaggtgcattgcccgcccggtacctggctgcggcaatacacctctttgtgtatctgttatctgcgcagaaaatagagaaagcgccggatgtctaagcaccggcgcttttctttatgtggcttattatagtttacactttacgaaaagtcaatgactaatcagatttatttttaaccccggctcacagccttccatctggctttctggccttcaaactgctcgttcagccagtccactccctttgcaatgccgtccgcgtcaaaggacaggatttgctgttccttttcttcttccggagtagcatcatagccatagggctcaggccaaatggtaacacccaggcgggggccgtcctcaccttccaaatccagcttctccatacgaaaacgcatgccgttgtggcttcctgtaaacttctcctttttcaggaaattaaccggcataaaatcccttaactccagcatatgctatcctcttttaaactacttttcatactggctcagctccaccaggttcatggtcagatccgtgatggtttcatcgtccacctgggctgccgtatagagtgtgtacttggtgcttccccactcccatgaagccaggcggccgccgctgtccgtggtcttaatcaggacctccaggctggtttcaccgtaatcatagttctgtgcaatagcctcatccttaaatcgctcgaaaattcccgcaaagtcctctgccgtatccgaggccctgtaggtgtatgccacaccgtccaaagtgaactgggcatccgccacctcctggttgataatgaaaaagctggtatcctcagccccctccggcagcaccatatggacgccaatggcctcaaaggccaggacatcctctacctccaccatgggattgggcagttcctggttcccggcttccggctctgttgctgtttctgccggagcggatgtctctgcctcagacgtcttagcaggctcctttttgctcccgcatcctgcggccagcagggccgtaagcgctattgccagcagaataccctttctgcccataaaccttttgattcgattcatgtaattcctccttccatccgtccatgcacaggtcactgccctttctgcatgggagccaccgtctcacaatattcctgcagcgccttgtgaagctgcccctgtgaagtctcgtcgcacagcaccactatcttgtcacctgccctgagcacggtatctcctctgggcacaaactcggcctccccgcgcataagggataccaccagagaggtccgtggccaggcaatggctgaaaccttctttccctcagctgcgcttccgtggtaaatcataccttccaccagcaccttttcccctgtgagcgtgacctttttgtccgggttctgctttgccagaaggcggtgcagaagctggtcgtacaccggtgcgcagtgaaccatatccggaaccagataggctgccagtgaaaccatggacaaggtcagcagatgagaaaaggatcctgtcatctcactaatcagtatgatgcctgtaatcggtgcccgcacaatggcggagaaatagcccgccatgcccaggataatgaaattccccaccaggccgctcagagaggggctgacaagaagggccgcattgtaatatatgcttcctatgatggcccccatcaccagcaggggcaggaagatgcctcccggagctccggatccgaagcttatcatgctgaaggtgaatttgaccaccagcagcagacacagcgccccaagcgccatctcacccgtggacagctcctccaccagggcatggcctccgcccagcacgctgcggtatgtaaacccaaacacacctgccagcagaaaggggatcagaagcttcaccgtgccccaggggatttttccgtacaagtcctgggttttagacagggtggtattataaaccacgcccatggcgcccatgagcacacccagaaccagcacatgtccgtaggtgccaaggggcatcatatgggtgatgtgaaaggaaaataccggcgtaaggccgaatacattcctggatacaaaatccgaagtaatggatgccgccatggaggaaaggagaagctccggtgaaaagtgcttatgtacctcctccaaagaaaacagtatgcctgcaatgggcgcattaaaggcggccgacaatccggcgctggctccgcaggtaatcagaagtttttcctctgttttcacacgcttggcggctcttgagaacccctttgctgtcatggctcccagctgaatgctggggccctcgcgtcccagggacaatccgcatcccagggatataatgcccccgcccagcttggcaagcagcacacgccaccatttttcgtcaatttccccgatgatttctccttcaatctggggaatgccgctgcctgatatcagggaatcccatttaaggagaagggacaccacacacgcggcaacggccagaatcagaatccataccggcacaaaccaggtatggctcttaccatagtccagtatcatgttcagcagtatatccgcggaaccgatgagatagcggaaggccaccaccacggcgcctgccagggctcccaccactaccccctctaaaatcaactcataacgaaaactccggtaacggttaatggtatgagtaaccgtatgttcttccggctgcataacgtttccccctgtatccttctggcctgatgcctacatctcactgtaggtgcccttgaattttacaagcttgggacggtagcccgcgctggtaagggcagatacaatctgattcttatgttctgtgccgaacgcctccatggtgatgcgcagctccacggcagcatttcggttgatgctgatgaactggttgtgctccagcttgatgatattgccctgctcctttgcaagaagggcggataccctggccagctctcccggcttgtcaggaagcagcacggacacggtaaacacacggtccctctcaatcagaccgtgctgcacgatggaggacatggtgatgacgtccatattgccgccgcttaagatagatacaatcttctttttctgtacgttcagatgctttaaggccgccacggtcagaaggccggaattctccacaaccatcttgtggttttctaccatgtcaaggaaagccacaatcagctcgctgtcctcgatggtgatgatgctgtccacattttcctgtatgtaagggaacagcttttcgccgggacgcttcaccgccgtgccgtccgcaatggtgttcacctggggaagtcccaccacctttccctccttaagggatacctgcatgcagttggcgcctgccggctccacgccaataaccttaatcttcgggttcaaaagcttggccagtgtggaaacgccggtacagagaccgcctccgccgatgggaaccaggatatagtccaccgtgggaagctccttgatgatttccatggcaatggtgccctgtcccgtagccacgtccaggtcgtcaaaaggatgtacaaaggtatatccgaactcctccgccagcttataggcgtgatcgcaggcctcatcgaacacatccccctccagcaccacgtcggcgccgtagctcttggtgcggttcaccttcataagaggcgtggtggtgggcatgacaacagttgcctttacgccggccagcttggctgcgtaggccacgccctgggcatggttgccggctgatgcagtaatcagtcctttggacttctcctcctcggtcagggtgtgtatcttatagtaggctcccctcaccttataggcgcccgtgtactgcatgttctccggcttgaaaaataccttgtttcctgtctgggcagagaaatactcactgtataccagttttgtctctgtggtcacatctttcacaagctcggaggcctcttcaaatctttccagtgtcagttcttccatatcttggtccttctttcccttacttttatcctatactatagcacgtcaatgtattaaattcaagatggattctcctccgcctgcttctgcacatggaacagggcattgacaaagtcatctgcattgaatttctgcaaatcgtctatcttctccccgattccaatatattttacaggaattcccagttcggactgaatggccacagcaatgcctcctttggctgtgccgtccagcttggtcaggataatgcctgtgatgtcggccacctccatgaactggcgggcctgggccagggcattctgtcccgtggtgccgtctaacaccaccagagtctctctgtaggcatccggatactccttgtcaatgatgcggttgattttcttaagctcttccatcagattctttttattgtgaagccttccggccgtatcacagataagcacatccgccttcctggacttggctgccgccactgcgtcgtagataacagccgccgggtcggatccctcctgctgcgcaatcagctccacgccggcccttgatgcccattcggtcagctgctcaatggcagccgcccggaaggtatctgcagccgccagtatgaccctgcgcccgtcgtccttaagctgtccggccagcttgcccacagacgtggtcttgcccacaccgttgacgccgataaccagaaccacggacttcctgtgctcaaattcgtatgcgttttcccctaagtccatctgctccttgatgctgttgatcaaaagctccttgcactcctccggttcccggatatgctgctccttcaccttcttgcgtaaatcctccacaatggacatggtggtctggattcccaaatctcccatgataagggtctcctctatctcctcatagaaatcatcgtcaatggcggaaaaaccactgaaaatggagtctatccctgacacgatattgctgcgggtcttggccaggccctctaccaggcgcccgaaaaagcccttccttccctctgccataaatcattctcctttttgtgtcttacatttaggtcttatatacaataaatatatatatgaatcatcatatcataactttcactatttatccagttgcactatttatccaggtcatccgcaatgaggttcacgctgaccagcgtggatacgcccttttcctgcatggtgatgccgtagaggcggtccgctgagaccatggtgcctcttctgtgggtgatgacaatgaactgggtattcctggtcagcttgtgaaggtatcccgcgaagcggtccacattggaatcatccagggccgcctcaatctcatccagaagacagaagggggacggctttaggttctggatggcaaacagcagggaaatggctgtaagggccttttcaccgcctgagagctgcatcatattctgcagcttcttaccggggggctgggcaatgatctgtatgcctgcctccaggatatcctcgtcctccatcagttccagtgtgccccgtccgcctccgaacaattccttaaagaccttgtcgaattcagcccggatttcaccgaacttttcttcaaactggcgccgcatcccggtatccagttcctcgatgattttctccagctcggcctgggcagtgaccaggtcctcatgctgggtgcgcataaactcgtagcgctccgatacctctttgtaatcctcgatggcgttgacattgatgttgcccagtccctttatcctggatttcaattcgtctatgagcttctttacctcagggacggactggtattcctctctcttaagctccagggccgtggaataagtcatctcatattcagaccacatataggcagtggacgcctccagtttttcctccagcttttccctctgggcctggatgcggaacatatccttgtccagctctgccaggcgggcggtcagttcctcccgctttgtcagaaacgccttctgcctggaggacatctcctccttctcggactcatggccagccatcacctgttccagctccttcatatgcaccatggcattctgaatcagttctcccagatgggcaatctcccggcgtttgccctcaatcacctgttcggaatttcccgtgccttcggccagtgagtcaaactcctccgtaagcttctctatttctccggacacacggtctgcattttcgcggataaagtcctgtttctggcgcaggttggctgcctccatctgaagggccgacagggccgcagcgcaggtctcccgctcttttctggaggtctccagaagaaccgtcttgtcctcgatctcctggttggcctgggtgctcacctgctccagctccctggagtcctgggtgagggctgtgcggctctcattgatttcctttacctgctcttccagctggccgtgctcgcgcaccaggtccgtggatgactccgctatctccgctttcttgtcctccagctgggatatgttcatgcggatggtattctcccggatggccatggactgcatgtcggcgcgcagcttctccagttctccctttttctcctgggccatggattcttccaggttaagctccttttgaatcttctccacctggaccagggccttgctgcaggtattttctaactcctcaatctccctgcgccgccccagcaggttgctggaattcttaaaggcgccgcccgtcatggaaccgccggcgcttaagagctcgccctccagggtgacgatgcggagactgtatttatactttctggccagtgcaatggcattgtcgatggtatctgccaccaccacccggcctaacagatacctggccaggccttcataccgtgaatccacctggaccagatcgctggccagccccagaacccctttctccttcagggcggccggctgggaaaatgtctgtttgccgttaatgctggttaacggcaggaaggttgccctgccgtatttattcttcttcagatattcaatcagctgtttggccgttgcctctgaatccgtcacaatgttctggatgcttccgcccagggctgtctcgatggccgtctcatacttctggctggtggtgatgatatccgccaccaccccatgtatgccgtgtacccgatcgcgcacctccatgaccctgcggatgctgttgccgtagccgtcatagcgttccgccaggtttttaagagattccagcttggtgtaggccatatggtattcctgctgggtatcgtttaaattccggttcaggcggtgggattcctgctcagccttaagaagggcgtcctcggcttcctgagccgcgaactgttttttctccagctcctcattcagctggtccaacaaagcccgttccctgccgataagctcgtcctgcaccgactcgtcgctcttgaatctgagaagcttttgggatacctcgctgcgccgtaaattcacctgctccagcatagtctcataccgctgctgtctggcagtcagggaggctctctcgttgagggcctgaatgatacttgcctttgccccttcaatggcttcctccagccggcggatggactcgtcctggtccccaagacgggctccggcttcctcctggcgctttacagcatccctcacctggtcgcccatggcctttcgttcttctctataggaggccagctgctgattcttggcagccagctcctccttgatcacgtcccgcctgtgctccagatgctcctggttcatctcctccgtatgtatctgttccttcagaacattaatctggccttccagattccccttcagcacagtgccctggctcagctcatcccggtcagctgccatgcggcgctccaggtccgccagagtctgctccagctcctcgtatccggccttcaggcgctcagactccctgcccgtgtcctccatatcgccggagagaacctgatgacgcttctccacttcctccagctgcttgcctgttccctctgtttccatgaggaagaggttggcatcgcaaatcttaaggctgtcctttaactgaagatactccctggctgccctggactgacgttccaggggacctacctgcttctccagctcagagaggatatcgcttacacggaccaggttggcctgctcgtcctccagcttcttctgggcaatggccttgcggcgcttaaatttaacgataccggcagcttcatcaaaaagctcccggcgttcttccggcttgccgcttaatattctgtcaatctgtccctgtccgatgatggagtatccctctttgccgatacccgtatcataaaacagctcgttgatatccttaagtctgcaggcgctgccgtttatcatatattcgctctcaccggaacggtagagtcggcgggataccgtcacctggtcatagtcaatggccagctgatgatcgctgttgtccagggtaatggccacgtaggcaaacccctggggctttctcatctcggttcccgcaaagatgacgtcctgcatgctggcgccgcgcagctgcttgatgcgctgttcgcccagcacccagcgcacggcatcggccacattgctctttccgctgccgttggggcccacgatgccggtgatgccgttatggaattcaaataccagcttattggcaaaggatttaaacccctgaatttcaatactttttaaatacatagtccacctgcttattcttctgctgcggcttcctgtgccttaagcttcagtatgccgttataggcagccacctgctctgctgccttcttggtacgtcccgcgccgcggcccacctcctcatccccgattttggcgcagacctcaaaggatttattgtgatccggcccttcctcacggatgatctcataggacaggggcgcctcctggcggctctgcaccatctcctgtaagatagtcttgctatcataaaagagctgcttgtgttcaatgtcgtttaagataaaacgatgaatgaactcttttgcattagcaaaaccaccgtccagataaatcgcgccaatcagggcctccatggcgtctgacaccacggaattgcggttcctgccgccggtggcgtcctcacccttgcccagatacaggtattggcccagctcaatgtcccctgcgcagtaagccagggtgggttcgcacacaatgctggccctgattttcgtcaaatctccctcaggcagcgtttcatacttgcggtagaggaattcgctggtcacgatttccaggacagcatcccccaaaaactccaggcgctcattgcatctgctgtggtccagacggtgttcgttagcataggagctgtgggtcagggcctgggtaaacaggttcttgttcttaaactcgtatgcaatcctctcttccagttcttttaaatgactgttcataatgatccttccttcttcaaatacactttgggacaggcctttaaaacaagcctcccaaacgcacaaaaagggctgtgcttacagcccctgtgcctgtccgttagtttaaagcgttcttaatctgctctactgcatcgcctactgtcacaatctgttctgcagcctcatttggaatctctatgtcgaattcctcttcaattcccatgataatctggaaaatgtccagtgaatccgcacccaggtcatctacgaatgtagctgccattgtcacttcctccggttcaatgttcaacacttctgcgataataccctgtaatttctcaaattccatctcttagctcctctttcttaaatcttgatttttacttcgtccttcggacttattcttcgttctgaacgttcaggcactgttggattttaccattgatatcctgttccttaaacgtcacacattgaataatggaattacgcacctccgtgcgctttgaattgccgtgggtcttgaccacaaggcctttcagacccagcaggggtgctccgccgtactggctgccgtcaaaggatttaagcgtttccttgagggccggcttcaccaaaagggcgccaatcttgctgcgcagggtggacatcataccgcccttcaccatactgatcaaggtggccccaaccccctcatacagcttcaggattacattgcccacaaatgcctcacagacaatgacatccgctccgccatggggaatttccctggcttcaatgcttccggtgaagttgatccccttacattcctttaacaggggaaatgtctccttcaccagcgcattgcctttttcttcctccgcaccgatattgacaatggccacccgcgggttctttattcccatcacatgctccatatagatggaacccatctgggcaaactgcaccagatgggacgctctggcatccacattggctccacagtcaatcaaaagtgatacgcccttctccgtaggaataagcggtgccagcgggggacgttccacacctttgctgcgccccactatcacctgtccgcctaccaggattgccccggaacttccggcggatacaaaggcgtcggcctccccctgttttacaaggtttaagcctaccacgatggaagagtctttcttcttacggatagcgtttaccggcggctcctcagtggcaatgacttctgtggcgttcacaacctgaatccggtccttgtcgtaggtgtgctttgacagttctgaaacaactgcctgctcctgccccacaagaagcacctgaatgccaggttttgcgttcacagcctccactgctccggctaccatctcgcccggcgcataatccccgcccatggcgtctaccgctactttaatcataatgactctcctttcggtcctgcatacaacttataatatactagatatcattctataaatcaatatattttttcaatggttttgggggaattaagaacccatgttcctgtccgctgcagacgtacaaacgttaaaaatatgcatacttctgcaactttgcaaagtcgttagacaatcggttcataacatggtaaaataagttctatagaccttgtgggggcatattatgaagcaatgcccctcccactccatttagcaggtgaataacatgacaaatgataaaacagatattctgggacaattcggatttgaactggatgcggctcttttttacgatgccatcgtaaagagtacggacgattatgtctatattgtcaatatgaaaaccgacacatccctgatatcggaaaacatggtcagggacttcgatcttccgggcagaatcgtgcccggactggtacctctctggggcagtctgattcacgaacgtgacagagctcgatatgatgaatccatcgaacaaatgttaagcggcctgacggatgtacacgatgtggagtatcaggtccgaaacagaaagaatgagtacgtctgggtcgtatgccgcggcgtcctccaaagggaccagcagggcagtcccgccatgtttgcgggcattgtgaccaatttaagccacaggggtaaggtggactatgtcaccggtctgtttatgcagcaggaatgcgaacgcgtggtggaggaatgcctgtccgaaggccagagtgggggaattctgctcctgggcctggatgatttctccggcatcaacaatttgaaaggacacatatacggcgattccgtcctgcgccagtttgcccagaacgtccagaggctcctgccagattacgccagcatataccgccatgacggggatcagtttgtcattgtgtgccagaatacgtcctacggcgagatagccctgctctatgaagtcataaacagctacagcgactgccgccatgaggtggacggaatccagtactattgtacggtttccggcggaatcgccgtattctgccaggacggttccagctatacggagcttttgacctgtgcatccggtgccctggaaacctccaagcataagggcaagaacaagtgcaccctctatgacgaggagctgattcacaccagactgcgctccctggaaatcatggaccgtttaagaagcagcgtcatgaaccatatggagggattctctgtggtctaccagcccattgtgcgttccagcgacacaaagattgccgaggccgaggcgctgctgcgctggtcctgtaaggacatgggcagtgtatctccccttgaattcatccctttgctggaatccagcggcctcattatcccagtgggaaagtgggtgctggagcagtctgtccgccaatgctgcaaatggcttgcctgtgtaccggattttgtgatgaacgtcaactgctcctacctacagatgctggatgaggactttgtacaatccgtcaaagaaatcattaaccgttacagactggaccccagccatattgtgctggagctgacggagagccgctttgtcacggaccaggaccgcttaaacgatacatttaagcgtctgcgcagccttaacatacggctggccatggatgacttcggcacaggctactcgtccctgagctgcctgtcctgtacaccggccgacattgtaaagattgaccgtgaattcatcaggggaatctgcgaccagtcccactccttcaaccgttccttcatcgggtctgtgataaatctctgccatagcgtgggaatatccgtatgtgcagagggcgtggaggaaaaagacgagctggaaaccgtcctcagattgaaagctgattccgtacagggattttatttttcaaagccggttacacctgatgaatttgaaaaacagcatataaagcatcctgatatagggtaagcctgttttatattctctcaaattccgctatctccagaggcctgctgtaatagtagccctgaatggcggtacatccgaaggaagtcagcagttccagctgttcctggttttccaccccttctgccacacattccacctgcaggctgtggcacatatcaataatgcattttaccacagtctgattggtctggttttccaccaggtcatccatcagggatttatccagctttacctcgtcaaactgcatgatggaaagaatggacatattggcatagttggccccgaaatcatccagggagatacgaaatccagcttcccgaagttttgaaccaatggattcaattaccttgcgctcaatgtcccctatgctttctgttatctcaatcatgaccaggcgggcggggatatggtatcttttctgcatatctgtcagcacccggaacaggtccctttcaagcagcgtaatccgcgaaaaattgaccgaaacaggaataagctccctgcctcgctccttccagtctgaaagcagtttaaatacctgctccagcatataaaaatccagataccgtataagctttgtcttctccagaaggggcacgaaattcagcggctgtgtggattcggtaccggctgcccgataacgcaccagggcctcggcggaacacaccttaccggtcaggggattatactttggctggagacagagacggtaacagccctcttccatgtcctgtagcagacgattcaggtattccggcgaatagtgcttgcgttcctggctgctgtccttataataaatctgtttgttcacaagcatcagttcttccgcatggcgcatcagccggtcaaaatccgccaggtgttcttcccaggtacaccccagtgagacaccgtttggggtgcggctgtctaacaaccattccattttcccgacccgctccatgaattcctcatatgcggattccaggctgacaataataaactcatccccgctgagccggaatatgctggcccctgcaaaagaggaggccatgacggatgccgcctctttgatggtcatatctcccctgctttgcccataatcacggtttaactgctttaagtcattgatatccccggccacaattccgcaggataccgccttgccgcttctcatcaaatcattgcggaaatgcacaaagctttctctgttcagcaggccgctgaggctgtcatgggcagcttcatactccaggcgctcatagaggcgtctcttttttatctcattcgcaatattataggcaatggaatccagcagcttaatggtgtcctggttgatgttgggattgtcgattccaatatatccgctgaaggcggattcgtcttcaaacggcacagcaaagaggctgtccgtgtttctggcggtcaggtaacggtactcgctggggtatgaatccctaagttccccggttctggagataatcaggtgctgcttcttgttaaaggtctcaaacaaatagggaatcccatccaggggcacctgctgcaaggctgccttttgggaaggaattccagcccggcaccattcataggtattacgggcaaatccctgtacacggtcaatttctatgatataggcccgctctccgccgtaaaaatcagctatcatttccagcgtacggttaatggcatcatccaggcagtccgcagtattcaggacccgcagcgtttccagcataacggtttccatatggtatttggatgtatggctgccgcgctccttcacgcggtctcccacatccactgcgatttccatgcgggcaggccttccctcccattccaccagcttatcctttacaatgaagttcttatttaagtggggattctcatattcccacacgtagaagccgtccttgctcagtttggcattggtgcagaagggacatggggtatccctgccctgaagtacacgatggcatttgctgtttcgcacgtcctcctgcttaagacctgtcagcgacctgccagcccggttaagataaagaaggctgtagtcccggatatcgctgacatagatgatttcctccagttcatctaaaagcggtgtttcatataagatcatatcctgctccatgattgtctccctttttactgtaccgtgtgatgttcctgttccgtgtccggccgggaagcccttcccgcttcatcttctatccggaaattatttttaccgctgtttttaacttcatagagcagggtgtccgccctctgataaagcgtggtatagtcgtcctccctgcggcttatagatataccgatgctgacagtcgcagcagggtatccggacgccctgcatttagcctgcagtgaatcaaacagtgcattgcagcattttgccagatggttttcccctgtatagggtacacagacgataaattcatctccgcccatacgggcagtgacagcctccccgcaaaaagattcccttagcgcttttgctgtatgaatcagcacctggtcccccgtataatggccgtaacggtcattgatttccttaaagccgtctaagtctatgacagccagagcaagggcgccggtatgcaggtttatcatccgggtgatctccatttttgctgccgctatattgtaaatccccgtcagagcgtcccgtttgctccgctgctccagtctctccctttccagcttgtcgccatggatattctgtaagcgtccgatggcagaatcagcctgattcccgtcgaaaatcacttttatgactgcacggtgccacttggtgtccccattcggcagcaccatcagaatctctgtatccacatcctgtctctgctccagcagataatacagagatgggagaccctcctcctgtccgctgcttccctgataccgcgaatactgcccgatgcttttatccgtgccgaagatttcaacgccctcccttgatagggtcagcacatcactgccatagtcatacgtaaaggtcacttccttcaatatgtctgagagatagcggtaacgtgtattttccagttcaatctgccgcttcatcctcatctggcttctgtaatgggcataaatcagggccagcaggccggaagcagccaacagggtaaacaaaatgaagggaacggaattatccctgataaaggtcctgagagtcacttcctgtttctgctgcgcattgttgtagatgtatttttccagttcacccgtctctatggaacggattcctttattcaggatagccagtatctgtttatcatcctttctcaaaatacctatgctgtatttcacactgtcactgccggcctggggatagatagccacatgctcgtactggttgcggctcagataataagaggcagtgtaactgttgctgtatgtataatcgcactctcccctttcaactgcgttaagactttcctccagagaatcatagaaccgcacatccgtccggtcatcgtcgcttttgcgcatgcccatatacacagcctgtaccccgcccttcaggtttgtcatatcaaacccgtcgcgggccaccagcacactctctgtctccagatatggattgcttaaaagaacatttcttcgttggactgcatcataatcatacaggatagacagaatcacatcggctctgccttcatttaacgcctgttcaaattcactgtaatcatccgcgtaaacatactccagcgtccatccggccttttgggctatactgctgagcaggtctctggctacgccctgcacctgtccttttccatcgtagtactggatggggccaaacccgtcatggaccagtaccttaagtaccggatgttcctgtatgtattcccgctccttgctgttgaggtgcatctggcttccggaccgggaaaaatacttattatacaggttcatctgaagggtgggattattctcactgatataggagattgcccggttcagttcattgattattttggtattacccttggtggtggcaaaataaaagggagtaggcgaaaatttagcaacaggacggaatccctgggacagggatacatcaacggacagcaatgcgtccgccttaccggaataaaccctctcctcctgctccccatccctctcgcaccaaacgatctcatactggatgccattgagcttcgcgtactggtaaaacttttcgttatggtaatctgcctgtttcaaaagcgctatgcgcagtcccttgaaatcagaaagattatattcatcaatgcggtcatcatcatcccggaccgcaatcacactgtacgcgttgccgtagttttcactgggaaaatcaaaaacagaggaagtctgcttgttgttattcatggctccaacaagatccagttccccccgttccagcatatccatcatttgaatcaactgttcatccatggatccttggggttccacaaactcataggtccatcctgtgtactgtccaatctctttcagataatcataggtataacccgcataattaccattttcatccttcatggtcagacccgactgcacgggaaatcccacccgaatcacagactctgcttctgctccataggaaacaaaactgtatggcagtatcaggcagtatattgcagacaaaaccatcctatattttttaatcaattggttcatggattttctcccggtcttttatatctattattcatgtacataatatcccatccattatataacagcttgccgcatataacaatgtaaatcactccccatgctgttaagacagagagggggattcccccttatggaaaaatcccctttttgtttaccttggcaagccggttccgccgcaatgtttccagccaatgtatttccagcagttcttttgctttattatcccttgcttccgttctttctttgcggtccagtcctcattcccaaaaaacagaagaaataggataatcatgctatataaacatattgtaaccctaatatcttaaaacttcaatgtcaaattatttatgtttccagcaatgttccggcaaatgcgcctgcatcaagattcgcattgtgaaccggacgtcagcgtggtaaaatatactcagataaaaccgtgatactttcagaatatccaggagggatttttatgaattatgaaggacaaatctgccgcggtcccatggagcgttcgtcctatatgcttccggttgccgttggctgttcttacaaccagtgcaaattctgcaccctgttccggcatctgaaatacagggaacttcccatggagcaaattgaggcagaactggaaagagtccgcagcctgggcggcaatccaaagcatgtctttcttggggacggcaatgcctttggcctgggtacaaaacgtctgctggaaataacagacctgattcaccgttattttccggactgccaagccatcaatatggatgggaccatcaccaatattcaggccaagtcccaggaagagctgcgggcccttcgggaggcaggtatacgtcatctgtatctgggcattgaaagcggtctggacgatgtcctgcgttatatgggaaaggaccataatctggaccaggcctaccgtcaaatcgaccgcatccaaagcgcagggtttatattcgatgcccatatcatgaccggaatcgcgggacatggaaggggactcgagaacggaactgccaccgcagaattctttaaccgcacccagccgcagcgcattataaatttctctctgttcctgtttcacagcgccccgctgtatcaggaagcgcaggccaaaatcttcatccctgccactgagctggagaacctgcaggaggaacggctgcttctggagcttctgaatacggatgggcctttgacttacgacgggtttcatgaccgtattgaattcagagtgcgcggtaccttgcctgatgacaagatgaaaatgttagacaggctggatctggccatcgaagggtacagggagcatgagcctgtcattgcagccgcagatgattcgcccggagcatattccatttaaaaacactaaaacaatcttgccttcatataatatcgtaactgaaacccttgtcctgacccatggattccaagcaaccgttttttcaggaatatggaagcgtattattgattggattctaaatcggacaaaccatgttcagtctgtaataaatatgagggagtgaatttaaatgagatatgattatgcgaacggtatgaaccgaggtgaatactcatatgatgagtcgaatgaatattccggatatgataacaggtacgcagagcccatgggcacaaagcccaattccttttgccacagatgctgccaaggtccaaccggtcccgctggtccgcctggttgtccgggtctgcccggtcccatagggccccggggctgcccaggccctcagggcatcaccggaccaaccggggcaatggggcctcagggctatgtaggccccaccggccctatgggtccaaccggtcctgctggtcaggctggcgcagttgggcctacgggccctgccggttccaccggccctatgggtcccgccggaactacgggagtgaccggagccaccggccctacaggtcctgctggtaatgagaattctgtcagctgccgctgtaaggagcaaatgaggaatataatccagcaaattattgctttatatccaaataataatttattggtgactttgagtagcggtgatgcatcttttggacgccctggttctttgatattagggccggatggacgtaccggagtatttgaagtgataaatcctcaaaatcaaatgcagtatttatctatatgcagcatagatacgattcaaatagacaatgcaacgtataatgatacaattgtttatttgccagagccgtttcccgctcccacagactgctgcgctgattgccaggcagccattcgttctcttttgcctgtgggaacagctggggttaatataataaccagcagccaaactccatccgtgggaaccgttattagaaatgaatatggcatgttagtactttccaatgaagccagaaccaatataacctttgtctcatcctgcagcattgatctgtttttgattaatacctgagacagttaggaacaggtgtacacccgctttttccaatgcggtaaaacagcctccctgaaacgtgtataacacttgacagcatacccatgagtggctataatgactataatatgaagaggaaagggtgagtgcaatgttattcggtaagttctgcattgattatagctccggacaatttgatattttaaaacattgtacggagcctgaaaatacgaaaacaatagccggcagctattagattccaaattactggttttggagttttgttttcgtatgttccaataaacagcagtttgtttttttgcggcggtggacagtgttttgtctgccgccttttttgattgctggtgataaatctgtctctttgagagcagagggcgtgcaggcttttgtacgccctctgcttttatatctggaaaggaacgataaagaatgaatgataaacaagacttaacaactggaactatttccaaaaagttaattgcctatgctctcccgctgctggccgcaaatctgctccagtcattttacagccttatggatatgctggtcgttggcagaatcgtgggagaaaccgggcttgccgcaatcagcaacgcctctatgctcagttttattatcaactctgtgtgtatcggcattacaatgggcggtacagtattagccgcccagtataaaggggcaaaggataaacacggccagattgagataatcggaaccttattcacagttgcttttattgcggcagtccttgtcaccgcagccggtctggccgcctacaggccgcttttccggttgctgcatgtacctgcgcctgcaatggaggacgcctgcggatatatgaaaatcatctgttatggaaccatatttgtatttggctataacgcagtctgctccatcatgaagggattgggagattccaaaagcccgctttattttgtggcggttgcaacagtgatcaatcttgttttggatcttcttctggtaggtccttttggcatgggcaccgaaggcgccgcctgcgcaaccattttttcacaggggatttcctttgtaatctccgtgttccatttgaagcagaaagattctgttttcgactttcggctatctcacttttctgtaaaaaccgacaagctggcggccatcctgaaagtcggtcttcccacagcggtacaaatggcttccgtcaatctttcctatctcctcattacgggaatgctcaatcaatttggcgtatctgtggctgctgcatctggtgtgggattaaaaatcaatacgtttgccggtatgccctgctgggcaatcggtcaggcggtgacagccatggcaggccagaatatgggcgctggcaatataaaacgcgtgcaaaaaacaaccagtacagggctttgcctaaatcttcttattacacttattatggttttactggtacagatttttggaaagcagctcattctcctgtttaccccggcaagcccggaagtacttgaggaaggaatcctgtatttaagaatatgctgcagtgtaaacagcctggtatacgcggtcatgtatacctttgattcctttgccatcggcatcggatctgcaaatattgccatgttcaacgcactgttggatgcaggcattgtcaggcttccggtaagctggctgctggcattccccctcggtcttggttatccgggcatatatatcggtcaggccctctctccgtttcttcctgctgccgccggattactctattttaagagtaaaggatggaagaataaaagaatcctttaaagagaacacagctatacaaattatacaaaaaagcaaggaggctgatacagtcatgaaaggaacaaacatgaatctctcctttggattggaagtcatctatgaagatgcggattttcatatagacgctcacgacaaagcgggcattgtgggagtaaacggcgcaggaaaaacaaccctgttccatgttttgatgcatgaacaggaattagacagcggcaccgtatccaccggccatttacgaatcggatatcttccgcaggaaatcatccttgaggacgaatcctgcaccgtgcttgaatacctgcagagcggacggccgattcaaaaactggaaaacgaactgaaccagatttaccaacagttggaaagcgccgattcatcggagcacgcccaactgtttaagcagatggagaagcttcagtcccgcttggaatcgttagattattacgaggcagacagcattcttcttcatatcattgaccgtatgcaaattgatattgacttactgggcatgccccttggcaatctgtccggcgggcagaaatcgcagatagcctttgcccgtgttctgtatgcaaaatccgacattctgcttttagatgaaccgacaaatcatttagatgcggcagccaaagaattcgtaaccggatttctgaaaaattacaaaggcacggtgctgattatcagccatgatatcagctttctaaaccagattatcaataaaatcctgtttattaacaaagccacacacaaaatttccgtctatgacggcagctatgatacctacaaacagaagtatgcacaggaacagcgtttgcgggaacaggccattgtgcaggaggaaaaggagatcctggaactggaggaatttgtccgcagggcaaaccaggcaagccggaccaaccatgcgctcaagcgtatgggacaggaacgcgcccttcgcctggagaaaaagcgaagggcgaagcagacccgcgaccggatctacaaacgtataaaaatggacatccaccccttgcgtgagtgtgccgctattttgctggaagcagaacacctgtcctttcactatccaaaccagccgcccctataccgcgatttatcctttcaaataaatggaaaagaacggtttttagttgttggggaaaatggtgtcggaaagtctacgctgcttaaactgatcatgggaatcctttctcccgatgcgggaaatatccattttcatcccaaaaccgatgtggcttactatgcccaggagctggaacagcttgatctgcagaaaacagtactggaaaatgcctggacggatggatattcggtaaagcagcttcgctctgttttaagcaattttctcttttatgcagacgatatccataaaaaagcagaggtcctgtcccccggtgaaaaggcccgcattgcgctttgcaaggttctgcttcaacgggcgaacttcttagtactcgatgagcctacaaaccacctggatcctgaaacgcagagcatcatcggaggcaacttccatctttttgagggcacgattatggctgtcagccataacccctggtttgtagagcagctcggcattaaccgggtactgatcctgccatccggcagaatcgtggattactcccgggaattgttagaatactattatggattaaattcagaggaggagttataaaatggcagatacaaaaaaattatatcccagaaccggggataaacagactgtgtatttaaaaaacgtaattacagatccggctattactgttggagattatacgatgtacaatgattttgtcaatgacccggttggatttgagaaaaacaatgttttataccattatcccataaaccgcgaccgcctgatcataggaaaattttgttccatagcctgcggcgcaaagtttctcttcaacagcgcaaaccacaccctctcttctctctcaacctacccctttccccttttctttgaggaatggggactggaaaagaggaatgtggccgaatcctgggacaacaaaggagatattgtcctgggaaatgatgtatggataggatatgaggcagtcattatggcaggggttacgattggggacggagccataatcggggcccgggccgtggtgacaaaggatgtccctccatatacggttgccggcggcattcccgcaaaaccgattaaaaagcggtatccggaggaaaccatagccgccctgtcagaactgaagtggtgggactggccggagaatcggattgcgcaaaacctccatgcaatacaggctgggcaactgaatgaactgaaataaattcattacatgcctaaagaattatgatgtcctgcacggccagcatgcgtgtgctgctggccctgtaatgtaactcgcgccttagcccagggaagccctcaggctgtccgctgtcaatgttttggcgcagcgcagcatttccataggtgtgccggtaaataccacctggccgccgttcttcccaccgtccggcccaatatcaatgagccagtccgcctgcttcatcacatccaggttatgctcaatcaccaccagcgtattgccgcgggacacgattaagtcaaacagcttgagcagattttcaatgtcggacatatgcagtccggtggtgggctcatccatcacaataatactcccctttctgcccaggttcttcgccagcttgattcgctggcgctcccctccggacagggtgctgaggggctgtccaagggtcagatagcttaatcccacctgctccatcaccttaaggcgcctgcggatcttggcgtcctcaaacacctgaagggcctgggacgcagtcaggcccagcagctccacaatattctttcccttgtaggtgcaggcaagcgcttcctcattataccgcacaccgccgcaggcctcgcattcagtcactataggatccatgaaggccagttcggtgacaatgacgcccttaccgccgcataccgggcaggccccggcggagttaaagctgaacagactgtccggtctgccgctctctcctgctagaagccttcgtatttcatcgaaaaagcccaggtaagaggccggtgtggaacggttggtggctgtgatgggtccctggtccaccattacgatattgctctcatagagttttgcaaatacccgggagatcagggtactcttgcccgaaccggccacgccggtcaccacggtcataatacccaaggggatatccacatccacatgcttaaggttgtggagacaggctcccctgaccggcaggcttcccgcagcctgccgcggcgtctccttgatgggcagtacctgcctcattgcctttcctgtcagggtatcggccagaagcagctccggatagctgcccgcaaatacaatttctcctccgttttgtccggcccccggtcccacgtcaatcacatggtcggcaatggaaatcacatccttgtcatgctccaccaccagaaccgtgttgcctttgtcccggagctgccgcagcaaattgttcatccggtaaacgtccctgggatgcattccggcacttggtttatcaaagatataggtcaggccggtcaggctgctgcccatgtaccggaccagcttcaggcgctgggcttcgccgccggaaagggagggcgtttcacggttcaagtgaaggtagggaaggcctatttcaatcagcctgtccagaccttcgatgatggtctgcaccaggacgtccaccctttggtcggtaatcccagccagaacttcccgaagtccggtcagctccatgcagcataaatcagcgatatggtacccctttattctgcagctcaaagccgccccattcagccgcttcccatggcagtcggtacactccatctcagcaatcagggattgggatttctcccgggtgtgcctgctcttattactgatatcccggttgagaagcgtctttgtgtacttgtggtacagcccggtcacctttgggttttccggttcgcctttgccgtcgcgggagccatataagagcaggttgtattcttcaccggaatacgctctgatcggcttgtctaaatcgaaaagaccggactgggcgtactgtttccagtaccaggatccggggcggtaaagggagtccttgacacagccctcattccatgatttatccatatccagaacagcttccacatcgacctttgtaatctttcccaggccggagcaggtcctgcacatcccgttgggatcattgaaggagaagtaagaggccgtacccgcatagggcttcccgatgcgtgaaaacagcagacggaggctggcgtacaggccgcttatagttcccaccgtggagcgggcattcccgcccaggggagactggtccaccaccactgaggccgtcaggttgtctatgcgctccgctgccggcttcggatatttcggcagtctggagcgcacgaaagccgggtaggcggcgttcatctgccgctgtgactcagcggcgatagtatcaaaaacaatgctggacttgccggaaccggacacgccggtaaacaccgtaattttttcctttggaatacggaatgtgacgtgcttcagattgttctgggtcagcccatatacaagaatatctgccatttttacctctctcgatttacgttatagtataccttatcaagtgttcatatgattatatgcccagggctccaaacgctctgccctggcctcattgtttcgtccatttctcttttatcttatcatgccggaattctgacaccttccagattacatcatatcaaaagggacttccccattcatgatattttttgcggagtttcattctttttttaataggagattgtctacgcttccggttatccagacttcgtcattgatagtctctcatccatacactcacacccctatggctggttttcccattccgattcccttttcaagggcagaatcagtctccataataataaatcgcctttaaatatcccttttcatcgaacaccggctggcctccgccgtaaccagctgctccttgattggttatatcgtcgaactgcatcactctttcgccgctttccaaatacgctttatccgggatactaaaatattgataccactcatgttccgctcccttgagcacatagaccgtacctttataaatatttttaaacaacgtatcgtcgctattcgcccacaacgtataatttcctgaataaggctcataggacagaaaatagtaatggggcgtatcctctcccgatgtttttcctgattctgtaccagaatcataaaaaagcatgcagtcgccataatcggaattgtccgtccttcttacagcagccgtctctttcgtcagctcattcacacaaatccgttcttctttaccctctttcatgaccgcttcatactgcttgggtgaaagaatgaccggtgtgtaaatcgtgccttctgcttcataatatatccctttatctgccctgtgctgaatatcagaatacaggcttacacccatttccgtatgggcagtaagaagagacgcatagggagccgttaaaagcccgtcataaatttttttcacctctttgctcttttcttcgtcaaattcagcttctgctttctttaaaaatgcaatatttcttttttccagaccgccaaacacggtctcgtcaaattcatcctctgttttatctcccagataccatgttttttcctgaaaataatctctcagctcctgcttttcaaatatccttccatgaacagcgtaatactggtttctcaggattttcatatcagccacagtcatgccaataagatctgtctcgttgagaggtctggagaaaaattccggcataaataaatcatccagaggaaaatagcttccctgcgcctccagctgtccgtaaagccctataaagccattctcagatggaacaatctggtattccttgatagttccatccgcctgataggcggcctgatccatactgctctgcatccggaacggatactccggatcatagtacatggaaagccggttaagaacggtgtagcctaacccatctttctttactacatctacatttagttggtttctgttcctgcgccctccgggcgtgattacgatctgataggaaaagtctcctgatttaaagtaggttctgcacagttttctggcttcgtccagaagcactgtatcgtaatctccctctacatcctcacctgctccgttctctgtattgttttttgctccgtcctctgcacggttctctgctttgtttattgcactatcctctgcactgttcgctgcactatccgctgtactgtcttctgcacttttctctgttaaagacagtgcctgtgaaggacggtccgcttctccgctttctttttgggcttctgctccggcagaagacagattaaccctgcccctatgtaagaaaatatagccggctccgacaaatgttgaaattataaacactgcacttaataccagtattatttttttaatcataatcttctcctttcattcggctttcccgcttgggggtgtgggagtgtcaagcatccgccaagtccgtcatttaccgataaggcgctaattttcttgatttgcttactttcttgatttgcttacttctcaattgaaataaacggagggaaggtatcggagctatcgcggcgctgcatcgttttggcgtccacgtcaaaacaccgtccatcgtattcataatgcagttttccgtcctcgcagtaaaaacgatgttccgcttgaaaagcaaccggcttataacgcccgtcctgtatcggctgatcccggtacaagacctgggattccgataatttcagcacactgttttcaagacgcacatcataaattccacttacgacagcttctgccggcacatttttcccggaagcggaaataaaacgaaaacagcctgttacagcgttcgtacttttccgcatggccagttcaaagcgaaacatggataccgagctgaaatcctttcttagtttatcccgctgtccttccttatcaatcagccatattttctcgttggatacaataaacatatctatctgaaatccgctttgggagtatttcagattagaaaaggatatctggtcagagtatatgccctgcaacgcgccattttccaattcgtaaaccaactcctttgtaaacagcgttctgccatccacattctcttccataaagtcaataatttctttcatctgaaaagactccttatctgctctgtttcaaataacttcttcatttcatctatacttctggtttcataattttcgccggcagctcgtcccgcatcactgtcaacagaaggataaaactgggcaaatgtatcatttcccatgtccacctgctttccggcccaatccccgacgggctcataatacgtcttttcgccgtcagactgcggcgacacccagaggcagaaaacaatcttgtcacctgcttgatcaagcggtactccttgggtctgatccaaaaccatattacctgcatcttcaaccggtatgttctgcagcatcatattgcgcactgtctccctgtctgtctttgcgtaagaattgatataatcattgacagaaatatagcctgtttgctggataactgtaatttctgctcccggtaaaagccggcctttgtatgtctccagaacacgaacccgctctttcacccatgcggtgcctccatcagcgttaaagttctcaaccgactccacttcaccatatatgatatctgatgaatgatttacgatattcttgtaatcagataaatcaatcgccggttctgcagaaacagtctgcggtataaccacagaatccgtgtcaatggaaataacatatgaattttccggtcccagcccggatcctgattcttcccatggctcatccgatgtctgtgccacattggctgagcagccgcctgttgacagcaatgctaatactataataacagctcgtatatttttcattttttcctcccaaacacgatatgaaaacacaatatgaaagcttgatgttgataatatcattttatcacatccgaacggcctcttcttttaattttactttacatttcacgtacaataacatcatggaggcgcttcaaataacagacgtatttccatccgttaaagccactaaacaaaaagggagtattgctttatcaaatgcaacactccctatcaattataacactattatattttctcctgaatgaatgcaagaatttccttacgctttgtcacagacagcttatagctctttccagacttaagagtcaccttgattccggtgggaataatctgaacaagaccgcccacattacataactgtaccgattcaatatcagcataggggatttccaatatggtggcaaaaccgcccctgaatacgattctttgatttgtaagccagtatttaccacgtttctggctataaaaacaaagtgttttctcccagtaatcagatttaaactccttttcaactacttcaccttcatgtaattctaatgcatctgccatgatttgttctccttttatgtatataattgaataatccctatatcatatttttgatagcgttttatcaccggacctggggaaaaatgccagctgcgcactctccgcttttggcacagaaacgggtacaaactggatactgtcctccaacagaccggtaataaagtctttggtcagaaccatctctttataatgtctgtatcacttattttccctccaactccttcatgccgccaatcatcaccttcagggacaagtcaaagctctcctccactgacagagaatggccaaaggcattgttgttgaccagcagacaaaagccttccaaaaatgcccgaaaggtacggattagatgattgcagttttcctcagaaatgttcagggatgatgtgattgcaaagcaaatggaaaacagcttttccgtgacgccctgcgtctctttatcctggtatttattataccagagcatcgcgctgaacacaccggggttttcggtcgcatactgatagaatgcccggcagaccgcttcccacgcagcatacccgtcagcacctgctgccgcttccagcatacgtttttccacctgtttccagccataaatcatcagttcacgacgtaaatcatctaaccccctgatatggttgtaaagggacggcggctgtatactcagactttccgccagcgttttcaactgaatctggtcaattcccattttgtttgctaactgtgcagccttctctactacaacatttttatcaagtcctgcccgcgccataacctttcctttcatcatctgttaaatacatagtaactaatcggattagttttgtcaagcgctgcttttttctgcaacaaacatattatatcatacctacgaaaaattttcttgtatgatatgacactcattctcactgttttgcctttaacctccatgcgcctgctcattgtaccatgagtccaaaaaaatatgcggtcttttgagtattctcaaaagaccgcgtatttaccaactcttcacaaatgtttgacttgttgaaaattaatcttcaacactgacgatttctctcttgttgtaagaaccgcaagccttgcaaactctatgaggcatcatcagggcaccgcacttgctgcactttaccagatttggagcgctcatcttccagtttgctctacggctgtctcttctagctttagaagatttattctttggacagatagacatggtttacacctccttcgactgtttaaaaatatcctggataactgacatccttgggtcaagtggcctattatcgcagtcacaagtctcatggttgagatttgtgccacatctatcacagattcccttacagtcatcgctgcagagaaccgccataggcaggttcaaggttaactcattaccaaccagctggtcgatatccagtttataaccatttacgtagggctgctcgtccaggtcttccactcgctcttcatcactctggttcatgtccagttcctggtcaatttccagatggaaaggaactctcaccgggtcaaggcatctggcacatggcataatcaaaaccaaatcaatggttcccgctaaagccagcttcttatttccccgatttgttatcaccaatgacaacggtcccttttctgcaatgtcgtatacagtgtcggccagcctgaactgggtcatctcaagctcaggcgtatatgttttggactttccctcaacgggaaacagctcagataagttaattagcatattaacctcctaatacgcatctcttgcattatacataccattgcacattttgtcaactatatttccgttttttttccagaagttgtgtactgttttgcataccggtgtgtacctggagagtattgccggattttgttatttatattatccgatgtcctgtcccaggccattgaccgccatcccggaaaccaggacaaaagccggcgtacatgtattaaaatcacatgtacgccagctttttaccactccgttatacttatttcactaacacaagtgtttctctggcaattgccagctcctcgttggtaggaataaccagtacgcttaccttggaatcaggagtggaaattacgatttcctgtcccctcttggaattggcctcgtcgtcaatttcaattcccaggaatcccagatactcgcacactttctttctggtaatcttgtcattctctcccacgcctgcggtgaacgcaatggcgtccacaccgctcattgcagctgcgtatgctcccacgtatttagctacccggtaagcaaatgattccagagcaacctctgccttcttattgccgtcatttgcagcgttctccacatcgcggaagtcgctggaaacaccggacataccgtatacgccggacttcttgttcagcacgtttaacatctggtcaatatccatattctctttgtgcatgatgaactgcagggcgccgggatccacatcgccgcttctggttcccatcacaagtccctccaatggagtcagtcccatgctggtgtccacggattttccgttgaggacagctgagatgctggagccgttgcccaggtggcaaaccactgttttaagggagtcataaggacgtccaagaacttctgctgttctctttgatacatagctgtggcttgtcccgtggaagccgtatcttctaaccttgtatttctcataatactcgtaaggaagtccgtacaggtatgccttctccggcatggtctggtggaacgctgtatcaaatacacctaccatgggtgtgttgggcatcagttcctggcaggcacggatgccgatcaggtttgcaggattgtgcagaggcgccaaatcgctgcactcttcaattgctttaacggcctcttccgtaatcagggtagatgcggtaaatgcctctcctccatgaacgattctgtgtcccactgcccctacttcatccagactcttaatcacgcctgtcttatcattggtcagggcatctaataccatctgaatggcctgggtatgggtaggcataggagaaaccgttacttccttctctcctcctgccggctgataggtaatctggcttccctcaataccgattctttcgcaaagtccctttgcaagtacagcctctgatgctgaattaatcagctggtactttaatgatgagctcccgcagttaataactaaaatattcattgatatctcctcctttattccggcttattcagcctgtgcctgaacggccgtaattgctactacacccacaatatcatctgcacaacaacccctggacaaatcgttaaccggctttgcgattccctgggtaacagggccgtaagcctctgccttggccagtctctgaaccagcttgtatccgatattaccggcatccagatccgggaacatcagtacatttgccttgcctgccacttcgctgcccggtgccttggaggaagcaacctccggtacaagggctgcatctaactggagttccccgtccagcttaagctccggataaagctcctttgcgattctggtggcttccactaccttgtccacgtcaggatgctttgcagagcccttggtagaatgggacagcatggcaacccttgcttccttctgtaccagcagttcaaatgaatcagcagatgatttggcgattgctgccagctcttccggattcggattctggttcagtcctgaatcggcaaaaataaaggttccctctgctccatattcgcagtccggaactaccatgaggaagaatgcagataccagctttgtgcctggttttgttttgacaatctgcagacatggccttaatgtgtcggccgtggagtggcaggcaccggacaccagtccgtctgcatctccgtttttaatcataagacagccgtagtaggcataatcggacatgatgatttcctttgccttttccggtgtcattccctttgatttcctcagctctacaaataaatcaatatactcctgagtcttctcataggtctgaggattgatcactgttgctcctgatacatccagtcccttgctgtggtctgcaatatcctccggtgttcctatgatgatcagattggcgatgtcctcttttaatatcgtttcggccgcctcccaggttctcctgtccatagactctggcagtactatggtctttttgtcagccctggcacgagctttaactaaatcgataaatcccatgataatttacccctttccttggtgtatttaagcatacgtctttattatatactgacagaattggagatacaagccgattttatccaaatattgcactttttcgtatacctgaggtctttctgtgtttattttccaccttttctgacggggcggcgggcggcgatagccaaaccgcctgccgtgaagcacagaaaacacaaaaaatccgcggaccatatgattgccggtccgcggattcaggtatctgatgattaaattttctcgtaacggtccacgttaatcacaaagatagtggcgccgcccacatcaactgtcatgggcatagttgcgtaatttaccatggtggtgcctgatatataaggcatgttgaccgttaacttctgatgctgtccgcattcctgcttaatcacatcaatcacttcctgtaccttatcatcttctgcaccaatcatcaaggttgtatttccctttttcaggaaacctcctgtggtagaaagtcttgtaacactgtaatgatgctgggtcagctggcttacaacatcatcttcattatcatttctcacaattgcatacactaatttcataagctgtacctccttggcgagtttatatacgttagtatagcacatttttcagttaagatctgtaatttttttgcaaatgtttcttaattcgcctcatgcacagtcaaacccataaaacagtactatccgttaccggttcatcagctctgggcggccggcttggttcccagagtcacctgcacgtcgtgctccacgtatgccccgtccaccagggactgtactgtgagtgtaacggctgctccgccctcatagtaggtgagcatctgcttcagttcttccatgctggtaacggactggccgtcaaacttggtgataatatccttttcctttaaatcagaggatgaggctgctccgccctccacgattttatagacatagattcccaccggcatgccgtacatctgggatgtggcagcatcaatgttggttccctgtattcccagatagccctgggcatcctcggatacagccacacgcgttttctttgtcatcaggctgtttaagatatcctgggcctttgaaatcggaatggcaaagcccatcccctccacttctgtggaagctgtcttggcggcgttgatgccgatgacatttccgtttaaatcaataagggcgccgccgctgttgcccgggttgatagctgcatctgtctggatgaaggtcctgttaattcctttttcatctgtaatctcgcggtccagggcgcttacatatcccacggtaacggactggccgtatccaagggcatttcctatggcaatgacctgctgccccaccttgatatcatctgaattgcccagagtggccaccttaatcttgctcatggtatcggaggggatatcctttaactgcactgcgatgattgccaggtcagatgctgaatccgttccctttaccgctgcgctcacatccttgttgtcaacaaatgtaacctttaagtcggaagctccgtccaccacatggttattggtggcaatgagaagttccgtgtcagtctggttcacaatgatgccggaaccgctgctctgggctgtataggtctggggcattccgaagaaatcgcgctgctccacggtcatggtatcattgatggccacaatagacggcatggcgttttccacaatgcccgacacatcggtaacagcggatactgccgtggcgccctggtttgcagacgcctgtgcattggccggtgccgcctgtgctatctggttctgagcctgcgtcccggctaatgtgcccgcggttccatatgcgcctgtgagccggttccccaggtaattcacacctgtcatgaccccgcctgatacggctccgaagaggaccgctgccgctgtaattcctgccgctcttttaacaaatcgtcctttattggagtgattgcgctgcttatcaccacctcccggatatccctgataagtatttccgccatagcagtcctggcggcgggtctggctgccgtatgaaccgaatgcggcgtctggtccctgggtatgctgctctcgatgctgctctcgggaaccctggccttcctgggcctgtgaataccgggcctgtgaatactgaccctgcgcctcctggctgcgtgcctccggatccattgtccggtgtccttgcgtattctgtccctgccggttcctctcatcacctggaatcgtccagtttacggttgtttcaggtacatccctgtgttccatattttcatttcccaaaccattcatattcttattttcattctcgtacatagcaaagtctcctttcatacatttctctattttatttaactgtaagggctgttttttaattgctcttgctttttacaattattaatatagccgccatttatggtggaattgtgaaacgattgtggagaatctgtgttctaattattatagatttataaactgaagattaacaaatgccgtctggacggaatggatgtttgcggatataatggatatgataaaataaaacgggaacgaatcaggacaggagtaaaggaacttgggacagccagatagtttggaacagccggcaaaggtaatcggcatcattgccgaatataacccgtttcacggcggacataaatttcaaatagaagaagcaaaaaaacggaccggcgcagactggtgcgtggctgccatgagcggcgattttgtacagaggggggagcctgcggtctacagcaaatatctgcgcaccagaatggccctttcctgcggcgcggatctggtggtggagcttccctccgcctttgcggtcagcagcgcggaggattttgccgcctgcggcgtggccctgctcacaggactgggggcagtggatgtcctgtgctttggcagtgaggacggggatatccgcaggattcggacggctgccggtatcctggcgcaggaaggcggggacttttcctcacttctaagcattggactgcgaagcggcctcagctggccccaggcccgcagccaggccctgcttaagatggcggacaaagataaggattttcctctgaagagagaagaaatggacaaactcctgggctcccccaacaatctcctgggaatcgagtactgcaaggccatcctgcgccagaacagtccgcttattccgttcaccatccgccgccggggacagggataccacgacaatgggctggagggcggacaggcttcagcctcagccatccggcggacacttaaagccggggtaccatccggggaagcgggcctgtttccatatgcaaaactgacgcctgaggccatgacgcacattcctccggaaatccggcccctgtacggccgggagcctgtcctgcaggccaacgatttgtcagagatactgaacttctgcctcctgtccctgaagcgggaaggaacggattatacgcaatacggggatatgtcggcggaaatggcgcgccggctggagcactgccttctcaaacaggtcagctgggaaggccgtatcgaacagcttaagacacgccagtatacctatacccggctcagccgcgcccttcttcacatggtcctcggcctgaccgatgccagggtacagtcctacaaagaggccggccgtgccccctacgccagaatcctggggttcaggaaagagtctcaggaactgctggccctggtaaagcagaaaaccgccattcccctgattaccaagactgccgacgccccccacattctcaccggaacagccctggacatgttttcacaggacatctacgcctcccatatccgtcagaccctgctctcaaaaaagctggaacagccggttcggaatgaatataaccagccaatctgtattttataagataaaaggcaaaatgacaggccccccggatgcaatgcccggatggggacctgtcattttattttcatatatatctgctaatatcagctgtctttagtttttcccccggactcccaaagctccggagccaggagctccaccacggcgggcttcacatgcaggaaatcagccagctcccgtatctggaggccattgtcccgtttcttcccctgacgcacagcccgaatcaatatattctttggcgtatgctccatatctataaattccagtatctgggttctgtatcccctgtattccaaaacctgggcacggatggcatctgtgtaaagggctgccatgcgctcttttatcaggccgtattggagtaccggccgtagaaggctgttttccatctgcccgttgagctcatgctggcagcagggaaccgataaaatgaccctggccccccagtttaccgccttttccagggcataatccgtggccaggtcacaggcgtggagggtaaccaccatgtccaccttctccactccctcaaaggaggcaatgtccccatgacaaaaggaaagtccctcatatccatactggcgtccaaggcggctgcaatgctctatgacatcctccttaaggtccaggccgacaatccgcaccggatatcccttcagttccttcagataataatacatggcaaaggtgaggtatgatttgccgcatccaaaatcaataatggtggactcccggtcctggtccaggttgggaaggatatcttctataaactccaggaaacggtttatctgcctgtatttgtcatagcggctgttcaccaccctgccctcttttgtcatgacgcccaaatccaccagaaagggaacaggaattccctcctccaggatataatgcttcttccggttgtgggacagcaaagcagcgcgttccggttcccgggaaaccgggtttccggcaggcaaaatcctggccggccgcggactctgcttcaccttcacagtcacctttcccttcctgctcaccagaataagggcatttccaagaccggatgcaatctccgcctggcggaaggatccgtccagaagcccagtgacataatctgccgcctcatcccggtccagattgcggtgaaatgcctgctttcccgcctgttcctccgcctggaataccagcctgcccttcatgagcagaggccggattctggacctggagattttgccgctgtccgtgggattgctcatgagaatccgctccagagattcatttaaaaacagatccagcgcctgtttgatttctttacattcttcctgattcatgtccagctcctaatccagaagtttctttgcaagggcggtgagctggcttaatgactcgatggtgccaaccggccgctctgccctgccaaaaccatatgccgcgtgtacaaagggaatcccggccgcgccggccgcttcctcatccatatgggtatcacctacataaaagcagcgttccagatggtttctctgcaccaccatgcggatattatctccctttggaagtccggtattgccgtagcactcaatatcacggacgtattcccggaggccgcagctctccagcagcacctcaatatatccgctctggcagttgctgacaatgtacaggccatactggcggctgaggcacgccatgatctccctggtctccggatacaggactcccggatgtgacagcaggtaatggttctcataggtcatgcactcctccatcaccttcctgcactcctcctgggacagccccggaaacagcgtctttccaatatccatcatggtctttcccatattgtcatacatatcccgggccgtgatcctgactcccagatgagggtaacgggccagcacctcattccaggattcagccacctgggccgccgaatcccacagcgtaccgtccacgtcaaacaatatccctttattcatacccactaccattcctttcccatccatattcgcaggctttggctctgaagccatacagcacttgtgcacccctaattttcagcactgacccatccctttcgcagcaaatcgggatagggctccagatgggcataatcgttgaaccgctccagtgtaaaacggccggatgccccatcccagttaagctccgtaatgctgcaattttccaggttcttaccgaggattctccatttgttcatggggattcccaggcaatgggctgtcacggaacggataacgcctccgtgggtcaccacggcaatgcgctcataaccgctttctgtcatctccctgaacacaggttcggcgcgccggaccacatccccggcgcattccccgcccggatagggcagatcctcctccataagggcctgctgcgccttgaaatccctgtacttcaccgcgatgtcccggtcttccatgccttccatatggccaaaggatatctccctcagctcgggccgtatgatatgctctacattccagtagagattggctgcctgagccgtttccacggcccgcagcagattgctggaatacaccacctgtatattttcatgaaacaggcgctctcctaagagagacgcctgcctgtatccttcttcacttaaatccacatccacgttgcacagcttgctgcactgcctgccgtggcgtatcaaaaaaatcttcatctgactgacctccatccgtctgccttagcccggataaccttaattcttaaagctgtggattggcgccggaattcttccgcccctggtaacaaaccgcctgcaggagaatgtgtttacaggcataactggcgcatagcccagcaaaccgccgaactcagccgtctcccccactttctttcccaccacgggaatcagacgtaccgcagtcgttttctggttcaccattccgatggctgcctcgtccgcaatgatgcctgcaatggtgctggagggggtgtctcccggtatggcaatcatatccaggccaacggaacaaacgcaggtcatggcttccagcttctcaattgtgagggctcccatgctgaccgcgtcgatcattccctggtcctcactgaccgggataaatgcgccgcttaaaccgcccacataggatgaggccatgacgccgcccttcttcacctggtcgttgagcatggcaagggctgccgtagttccgggcgcgcccacgcgctccagtcctatctcttccagtatctcagcaacactgtctcccaccgaaggagtgggggccagggacaaatcaatgattccaaagggaatgcccatgcgcttggaagcctcctgcgccaccagctgtcccacgcgggtaatcttaaacgcggtctttttgatggtttcacagagcacctcaaagttggcatccctcacctttgccagggcaaccttcacaacgcccggaccgcttacgccaacattgatgatggcttcggactccgtgacgccgtggaaggcacctgccataaacgggttgtcgtcaggggcattgcagaataccaccagcttggcacagccgagggaatcatggtccctggtggcttcggctgtctcagtcacgattcttcccatcagttccaccgcgtccatgtcaatgcctgtcttggtggagcccacattgacggaactgcatacgcgctctgtctgggacagcgcctggggaatggagagaatcaggttcttgtcagccctggtcatgcccttgctcacaagggcggaatagccgccgatgaagtttacgcccacttcctttgcagccaggtcaagggtcttggctatggtgacgaaatcctccgggcgcttgcaggcagaaccgcccaccagcgcaatgggggtgacggagatacgcttgttgacaatgggaataccgaaatcagcctcgatatcctggcccgtggaaaccaggtcctttgccagagtcgtgattttcttataaatcttttcattaagagcctcaagattgctgtccacacagtccagaaggctgatgcccagggtaatggtacgcacatccagcttctcatgttcaatcatgttgtaggtctcatttacctcgtacatatttacgttaatcatagttctttcgtccctttcttctgaaattacaggcccgccctatcctctggggatgccgttagatacggtgcatcttcaggaaaatttcttcccgctgaatcttcacgctcacaccgatttcctctccgacctgttccagttcctgggctacttcgccaaaggacttggttatgttctccacgtccacaaccatcatcatgttgaaaaatccctttacaatggtctgggtgatatccagtatattaatctggttctcagccaggtatgtacatacgcctgcaatgattcctaccctgtctttccctactactgtaatgattgccttattcatcttcattctcctcacgcttttgttttattgaaatccggtgaacggatatccatacgttttacagatatatgatttcactcatgcagtccctgctggccacggaaatggaaaagtcagaagctccgtaagggcagtctccctcgtcaatctccagccgtacggtctcgtaggccagctcctcgtaattgttctccttgctgagatgtcccaaaagaatttttttcagtctgtcgtgaaggacgcagtttaaaagcctgcccgcattttcattggacagatggccgtggtcccctaagatcctccgtttcaggtaatagggataaggtcctgtctccagcatcctgacatcgtggttggattccaggagcagggcgtccagcccctgaagatggtctatgatatactggtcaaaatgtcccatatccgtggccacagccacggacttctccccgttttgtacgcggtatgccaccggattcgctgcgtcgtggtcaatcttaaagggcttcacggtcaaatcgcctaccatgaaatccaaatccgggcataccggagtcagaagccctttatcaaatttgcccaggctgcctgcggccgcaatctcatccagggtttcccgggtcccgtaaatgggaatctcatacttgcgcgacagcactcccagtcccttgatgtggtccgaatgctcatgggtaatgagaatcccgtttacatcgtttcccgtaagtcctatctcatttaacccctgctgaatccgcttgttgctgatccccgcatccaccagcaggtgggtgctgtcagaacctatgtaaatacagttgccgctgcttccgctggcaatacttaccattctcatgttttacagtccttttgtcttatttattgcattctgattttgttcttcaggagtctgcggatctgttttcttgtgtcctccacagagccgttgttgtcgataaccgcatcagaaaactccctgaatccggcctccggcgcctggctgtccataatgctttccgttttctcctgtgtgtaaccgcggctctctctgagacgctccatgcggttctccctcgatgtataaacataccacatttccccgcagttgtcacggaattcttttgagggaatggccgcctctatgaccaccagaggttcagggcaggcaagcgcctccccaaaggccgtattccataccaggggatgagtcaggcggtccacctggacgcgtttatcagggcagccaaagattacctgggccatggcaggacggttgatggttccgtcctcattcagtatggacggccccaggaagtccaccacagcccggtagctctcctgccctggctgcatcaaatcctttgccacctgatccgcctggatgacacggaagccatactcctccttcagtatctccagcacccggctcttgccggaccccacgccgcctgtgattcccaatatgaacttaccgcctgcggggtatgcatttcttatattttccatatcctgccgctgccccttttgatgtctttattttccgtgctttgtgctttgatctcttcctaactttcctacttggcgtcaaaccaggattttcccacttccgcctccacttccagtgaaacccttaaatccgcggcatgcttcatcttgtcggtcagaatctccttaaccgcctcaatctcatcccgggccgtctcaatcagaagctcatcgtgaatctgaaggacgattctggatttcaggccgcgctttttcagctccctgtccactgcaatcatggctatcttcatgacgtctgctgcggttccctgaatcggtgagttcatggccacgcgctctccgaactgacgctgcataaagttggcggacttaagctcaggaatgggccgcctcctgccgtacagggtcgtcacgtagccctgttccttgccttgcttgaccagtccgtccaggaatgtcttaacccccggataggtctcaaaatatttgtcaatatactccaccgcctccttgcgggagatgctgagtccttcgctgagtccaaaggcgctgatgccgtatacgattccaaagttcaccgcctttgcgttgcggcgctggaggggagtcacttcatcaaggggtacatggaatacctgggaagcggtgatggcatggatgtcctgggcggaacgatatgcttcgatcagcctctcatcccctgacatgtgcgccaggatgcgcagttcaatctgggaataatccgcgtccacgaacacacagccttcctttggaacaaataccttgcgtatttccctgcccagggccatgcgcacagggatattctgaaggtttggctccgtgctgctgatacgccccgtggccgtaatggtctggttgaatttgccgtgaatccttccgtcctcaccgatgtaggctgccaggccttccgcataggtggaattcagctttgtcagctggcggtagtccaggattttctggaccaccggataatcaggcgccagcttttccagtacatccgctgccgtggaataaccggtctttgtctttttgcctcccggaagctccatctgttcaaagagaatctcccccagctgcttgggggaattgatattgaattcatgccctgtctcctggtaaatttcctgttccagcttggcaattcccaccttaagcctgtctccatattcctttagctcagcccgttccaccttcacgccctcctgctccatatggaaaaggctgtaaatcaggggcatctctatatctgtatacaggctgtacattcccgtatcctttaactggcctgccaggggtgcagcggccttccacgcggtatatcccatgtagcatacacagtcaacggcattcttctctcccctccacagggcatctcccagatcctccttggccagcaggtccgccctggagggcacggtaagccccagataatccctggccagatcgtcgtaggcataggtatccttaagaggattcaaaagatatccggccactcccgcgtcatacacaggatccgtgtccttaagttccaggtacgcaagcatggattttaaatccagggcccagagctctctgacgcctgggttatcctggccctggctattctgtgcctggttatcctgttcctgatttctcccgcacagcgccctgagctgttccagaagatactcgccggtaatctgctctcctgccgccagacagtaaatatcctcctcgcccaggcacagggccaggcctgtcacgggattcagcccggatctggccttttttcctgcttttacttccccgttctcgtcaaagctgaaggacagctgctctgctgtctcctttaaagccccgtccctgccaagtatgagctggaagccagccagcccggcctctgctgccctgccgaatattttatccgctgtctttatatccttcacaagggtaaaatgggtttttatatcaggcgcggctgcttcctgggcagcggttttatcaaaacgggccaggatggacttgaattccagacgcttcatatactggtaagcctccggggtatacaggtcctcaatccgggcgtcctcataattaaattccacaggacagtccgtacagatggccgccagcttcctgctcatctgagccatgtcataatgctcctccagagccttcttagccctggggggcctaatctcctccagatgggcataggcgttctctatggatttgtactgggcgatgatgctggttgctgtcttttccccgatggaaggcacccccggtatattgtcggaggcatcccccataagggccttcacatcaatgaattcctccggcgtcacctgatactcccgcagcacatcctccgggaaatagtccttgatctcggtcacacccctgctggtcctgggaatccgtatcttgatgtgctcatcagccagctgcagaaggtccctgtcacccgataccacggatacctggataccctgggcctgacaccgctttgccacggttcccagtatatcatccgcctcaaaccccttaagggtcatgataggaattcccatggccttcagcacatccttcatcacaggaacctgctcatgaagctcctggggcatgggctttctcgtccccttataggcgtcatacatctcatgccggaaggtaggttcctttaaatcaaaagcaacggctgcgtggtccgccttttcctcctccaatatcttcagcatgatatttaaaaaaccgtacactgcgttggtatgcagaccctccgaattcgtaaggtccggtaccccgtaaaatgcccggttcataatactgtgtccatcaatcaaaaccaatttgtccattaatatgagttcctttctgtctctgtcaccacatcctgaactgaagcaccagcacggccagcacggcccagaagcacagagtgttcaccgcatagcgggctgtctccaggattcccagggtgtgcaccctctgccgggacagctccagagctgtctcaagggctcccttgatgttataggtgcctgtttcctggtccagctggcggatacccacgtccactgtgaagtaaatctccagctcttcccggcattcctcgcaggtctcgatgtgttttaagaattctttcagttcctcgtccgtaatgctgccgttgatatacggcatcaccagacgctccgcttccctgcaggtcacagccagcacctcctgtctatcattttaatccaattcttcttacatcatacaataaatcagcttacttttcaatgaaagattaggactcccatccccccatcctccggttccggacagactaccccttcctgtattccctgggagatacgcctgtcagccgccggaacacatccccgaaataattgccgtccgagaacccgcaggccatggccacactggtcacagaaaggtctgtattgcgcagcatatcagatgctttctgcacgcggatgtagttcagatactccttgaagcaaaggccggtggagcttttgaatttcttagaaaagtaggtagggctcatattggcaaatgcagccacctgccccagcgtcaccccttcctggtaatgctggttcatatatctggccgcacgcaccatggcctcctctgcctcctccagcgcgtgtccttccctccgggcctcctggcagcggcccaataccaccagaatctggtgcaggaggctgcaaagctgtatctggcagtagctgtcgccctgcttttcctcatcctgcatctgagccagcagttcctctatcttagggcggaattctgaaggaatggtgcgtttgggctgtgaaaagatatggccaaaggcctccctcccgcaaaggcttaaaaaggaggtgaccgtgtccctggagaaatagatgccgaagcgctcagcctcccagcttggctcatacagggccttgtggacctcaagaggcggaatgatggtcatgtcacccggttccaggtaatagatgtcctggttgatgaacattttacactttcctgataacagataataaatctcatagtaagaatgataatgaggccgcttcatcacaaagctggaggaccttctgatacggctgacctgaacgcttttatcctttagaatcatggtattgctcatatgcggtctttctccttccatttctctttcatagccggaccgtcatggcaaaaaaactgtactttttagaaaaaatcccataaaatccgtattattccatctgtttttgttataccataaagccaaccaaaggtaaacaaggaatcagacaaggaaatggaggaatgaccatggctgaaatgaccatgatatccatggctgtaatggctgccacacaacaaagccgctcctttttggaagcagcagccgggcgtaaggacctgtatctggaggaaggccctctggaggaaggaactttggagataggcactctggggataggaactctggggataggcactctggagaaagcagacgtcatatatcttccggattacagcagtctggatttccggcaggtgcgcaaacttctgaaggcaggaaaacacgttctgttcggaaccatgggagctgcagatgccggcagcctgaaggcgctggcacagacagccgatgaacatggcgcagtgctgttggatcacatccaccttgcatttaatccatgtatggcatcattaaagacagcgctgacatgcctggggcccattgggcggattcgtctccattcctgtgagtatgccttctgctgtgaggggttacgcatttctcctgtccgtccccccgcctgcgttccgccgggaggcgcattgtttcagaggggcgccgactgcctctatccccttgtgcatctcttcggcataccggaacagatggatgcccagatggtgctcacggaacatggaatggacgcagccggcactgtcaggggatatctgggcaccgcccgagtggagatagtctattccaagatatcaggaagccatgtaccaagtctgatagagggagaaagggggagcctgttaatacgtgatttacggaatttaaaggaagtgacatataaaaaccggtccggagataaagatcaactggtttccttttccgatgaagcctgccgcgccagggaactggaccgctgtatggcgttcataaagggaaaatgcagctggcagcgtcagcttgcatcctccatacagacacttcagaagatggatgaaatcaggggacatcggaatttgtctgcggaatataccgtttcctcccatggcacctatgcctccgccatttaaacaagcctccgcctttgtctgtcagaaaaaggccggacgcaaaagacccacacagaatcacttctgcatgggtctttttttgtctcatgtgccgtcaatctgacacgtatagatgccggcagcgggacttgaacccgcacgcggttacccgcaacagattttgagtctgcatcgtctgccattccgacacgccggcttacaacgctgattattttatcacaggatacatattttggcaagtgttttttcaaaacctttgccatttttccattccggtactataataaagcagataatgaaataaagaaatagaataacagaaaaggcagggtactctttcatggctgtgaactacttcaaaaaaatcggggcgcgccggctgctcatcatgattatgggaaatgtatttcttggaatgggaatcagtatattcaagctgtccggcctgggcaacgaccctttcagcggtatggtcatggccctggccaatatactgggcttcagctacgcctcttttttgctggtcattaacggcggactctttatctttgaactggccgcaggccgcagactcataggaatcggcaccctggtaaatgcatttcttctgggatatatcgtcaccttttttaatggtttatggcccctgctgtttcctgtgccggacaccatgctcctgcgcgtggtcaccgtgcttgtcggcgtcattgtcaccagtttcggcgtgtccctgtaccagacccccaatgcaggggttgcgccttatgacagtatttccctgattactgcaaagagccgccctcttatcccctacttctggcaccggatagccacggatgcagtttgcgccgtcatatgcttcctggcaggaggaatcattggcctgggcaccctggtgtcagccttcggcctgggccccattgtccatttcttcaatgtccaagtggccggacggctggtaaaagactgttaaggcaggtatctgcccgcccaaaacagtccctccggcccttcccttacctgattgcctgctggccgctggccttatatatttcataccattcatagtgctccagacggatgtccagggccttaatggccgtatccagcctgtccagcctgttgcttcctgaaataggaactgcccctgccggatgatacataatccatgcgtatatgatggcagacgggtctgcgtcatgcttctcggcaatcctttttatggttttcatagccgcagcgcacaggctgtcgttgggatcaaacattctcccccctgccagaggcgaccatatcatgggatggattccggacgcagtcaggtcatccatcattccggaattaaaatgttcaaagcacacagggttccactcaatctggttcgttaccagctgtccgttgacagctctgttaagaccgttgaatttatgagggtcaaagttggagacgcccatttcccctatttttccttccttcttaagctctgtcagtgcctttgcagttgattcaaaatcaatgcagggatcctcacggtgaatcagatacaggtccagatggtctgtatgtagccgcttcaggctctcctcacaggactgttttaccctgtcgtatcttgtgtcataatatccaaatccgccctctttgaaaataccggttttcgataccagctggattttgtttcgaatggcgcgatcctgttcaaaggcctgccccatcagcgtctcacagagcgtgcctccgtagatttccgccgtgtcaaaggtggtgactcccctatcaatacattcattcatgaatcgggccagttcttctgcagaccatttccagctgtccagcctccagaatccctgaaccacggctgacaatgacagcccttccgacaatttaacttttttcacgttaatcctccttaattaagaattcagcttttcccaaacacagaagcagtcttaatatccagtttcctgcaccactccttaagcacttcctccctgcagcaggatgcggaaaaatcctccagctcaaaatccaggggtatgtcggtcttaatggtggccagctccttagacagcctggctgcggcttccccgcacagttccccttcctcccctgtcttggtcaaagatttgtagggggaacggctgattcccaggcagtttttccagaagtcctgcagctccttaagctgcttcttatcctgctccgcctcatgtatcacctcataaatatgttccacggtgccgtattctcccagcaaaagcggtgctgcgctggcaacgccgcggactcccgggatattgtccgaggtatcgccctggattcccttcaggtccgtaatctgcctgggccacactccttcctcggaatacaccgtctcagccgtaaactcaaaggtcttttccggcaggttcaccgatgccttatccaggccgtaaagcccgtaatacttgtcgcagagctcctccgccttttcctgcctggcctggaccatccaggcccttacattatactcatcgctcacaagctgaaggtaatcatggtccttggtcatcaccaccatgggcacctgctccctgaatttatagaccaggcttcccgcatagtcatccgcctcataccggtcgctgtagagcaccttaaaacctgcttcctccagaatccgctccatcagtacgaactgctgcttaagtggctccggtgtcctgcttctggtccccttataatcaggatacagctccctgcggaaggtatcccttgtcttgtcaaacacaaatgccacataggccggctgctgctttttcagcagggaaaccacggccttcagcacccccatgatgccattggtataggtcccgtccgatgcgtggaggattttcccgtaatgcttttccttttcctcgtccgtcttggcgaacatgatttccctgggtaacactgcatagtaacaggttgacagcagggatgagccgtcaacaatcacgaattttctttctgacattctgattccatctctttcttacgtattctgtcattgtgcgggccattatgcttacctgcggtgatgcctgtcccagattccggcaaacagcagggcggctacaatgaataccagcactatcaagcgttccatctgtcccatatggctcctccttccggagacatgactgtaacgggaagtcacagtttcctcaaaactgtatcatacaccagttttgtcctggcgtcaaagagaacccacagaatctgttccagttcacccggatactctgccgcaaattctctggcagttcctatggcggtttctgctgccagccccaccgggaagtggtatataccggtggagacagagggaaatgcaatccgcttcactccattttccagggccagcaaaagggaattcctgtagcaggaggcaagcttctcctgctccccgcatgtgccgccgttccacacaggacccacggtgtggataatataccggcattccaggttgtaggcctttgtaatcttggcctgtcctgtcttgcagccacccaacagcctgcattcatgcagcagttcctttcccgcggccctgtggatagccccatccacccctcctcctccaaggagggatgagttggccgcgttgacgattgcatccattccggttatcttcgttatatcacctaatacagtacctatgactgtgttgttttcatttttcatagctggcctcctctgatttctttcctttgattataccatataacccctcagtcccgacagcagtaattcaccgattttccccgctccgccgtcagccgcaaaggtatggaccagactggccttatccctgccaaggatattttccagctctgcaaaggaaagcaggcctttgaggtacagctttacgatttccattggtccgcttccgatttccgccaccagctctaaatgtgtcatgattcaccttctttctgcctttttcaaccttccattaaaaatgccggcctaataatatatgcaggctttttccagaatattcctgttggcagccatatcattccattgaaatcatgaaaatctttcgctttccctatggtaaaaattaatcattccattaaaaaaagtcagctttttgtaagaaacattacgcttcattacatttcactgacttccgttgcaattcatcctgaactatggtatattcacatcaggtcagaaatgacgctagcccggcagcttccacagccccatgttgtggaagcaccgggctccccccaaaaagattatctatcatcattcttcgtatttccagatttgcacctcacctgaatatccctcaaatgtacgtttaataatatcctccactatattccagtcgcctcctgcgctgccgcatcctatcttatagggaaatgccactgtctcgtttttgcccctggcttccaaaaagctccggatttctcccatcgctttttccaatgcgtcataatcggtatagaccatcttttttctgccgtaatcatcctgtccgtacagattgccaatcagaaaccagcgtccgtccttttccaccggctgggcagacacccgtcccagcagcttggatgtgtccccgttttccttttcaatccactgcttcgttatccgcttatacgttttctccacttctggaaacagcttctttacctgtcctgcaataccatagccgaatgcgccctggcagttcacctgatgacacagaatatctgcctttgaatcaaatatgctgccattgtaatattgaatcataatttcctcctctatctctttcatgatgctgtccgcccgttatatcatatcccggtgctcggtccggcccagcagataatccacggaacagccgaaatagtccgccagttttaccagtgagaccgcgttcggcacgctccttccgtttttccagtcgctgatgtttcccatggatacatccagatccctggatacctggctggtactgcccttccgcctgatttccgcaaacagattcttcaagtcaatcctttcctgtaccacatttcattcccccaattccagtataaaagttgtgtcggatctatcataaatgctgagaggaaaattgtaaataaaaatatgcacaaaagtccttcaataatttgtaagtatttcttcaaactccgtccatgaatatcatgtataatagttacaattcgggtattgcccggaatacaaaggaggattattatggatacaaacaagaaaatattgataggagccattggcgctgctgttgtcatcggcggcattgccattggcctcctgctcagcaagacgccggaaaaggcagacctgtccaccatacatacagaggcagctacggaagctcccaaggaaacgcttcccgccgccacacaggctccagagacagaggagaccacagaaggccaggaagacgctgcttccagtgtttccgcttccatcgagacctatacatccggaaaggtatctatccagtatcctgcggtggaccagatggatgacgcctcaaagaaggacaagattaatgaactgttaaagaccaatgccctgtccttcataaaagccaatgacatcgacgagtccaacgataccctggatatcaagtgcaaggttatttctgtggaccgcaaacgtctcaccgccacttacaccggcactctgtccgcaaaaggagccgcccacccggtcaatctgttttattccaacacagtcaatctgcttcaggcccagaacctgggactggatgattttaccgacgcctataccatggccggatatgtgctcagcgacgatgtaaagttttccggcatttcttctgatgtagaggcccaggtcctgagctaccgctcttccatggatttggattccctgaccgctgtctttaacagcgcggacttccctctgtcatcagagacccagtggcccgaatccttcagctatgaaaaacagggaaccatctacttttcactgcctgttccccatgccctgggcgactatgtgctggttgcatttgaccccaccaccaaatagtcctttaaccggggttgatatcataagatatttgatatataattatcagtaattctaatagataaaggagcagcaaaatttatggataacgtaatggtatttgaccaccctttgattcagcacaagatttctattctgcgcaataaagctacaggaaccaatgagttccgtgccctcattgaggaaattgccatgctgatgggctatgaagccctccgcgaccttcctctggaggatgtggaggtggaaactcccatcgagacatgcatgacccccatgattgccggacgcaaactggccgtggttccgattctccgtgccggacttggcatggtaaacggcatcctggctctggttcccagcgcaaaggtaggtcatatcggtttatacagggacgaggtgactcacgaacctcatgaatattactgcaagcttccaaaccccattgaagagcgtaccatcatcgtcacagatcccatgctggccactggcggttccggtgtctcagccgttgactttatcaaggaacacggcgggaaaaagattaaattcatggctatcatagctgctccggaaggccttaagcgtctccatgaagcccatcccgatgtgcagatttacgtgggacatctggaccgctgcctgaatgaaaacgcctatatctgccccggactgggagatgccggagatcgtatcttcggaacaaaataacaggaattattacaggcaaatacaaattcagggatatacaaaccaaagataaaacaggaagccggacttgcgatgtgcagtgtccggcttcctgtttttataaactctctgactgttccgtgtttctgttcgttctgtactgacggcttattttactaccttaagcccgccctttcccttctcaggtgcctcgggcgcttcctgctctgtttccacttccctggcctcttttacaacgatgttgtcctggcccttgtagatggagtcagagggaacacagccgcgtacgctggacagcgggtatacattagaattacgtccaatgaccgttccgggattgagcacgctgttgcagccaatctccgcgtgatcgcccaggatggcgccgaatttcttgcgtcctgtctccacatcaccatcctcagcatgaacctttacaagacccttgtcagccttcacattggaggtcactgcgccggctcccatatgtgccttgtagcccaggatggaatcgcccacatagttgaaatggggcacctgcgcctcgtcaaagatgatggagttcttgatttcacaggaattgccgatgacaacgtgctgtccaaggataacgcctcctcttaaaaaggctccgttgcgtatctgtacctttggtccgatgatcataggtccgcccatggcagtggtgggagccatctgtgctgtcttgtgaatccagatattctttccaatcttcttgtattcgttctccggaaggctggcgcccagactttcgatgaacccattgatgtcacccagaacttcccatggatactcatggccctcaaacagcttttcagcgattgtatggcttgtgtctaaaagttctttgattttcatctgttccagtttcataaattaattctccttttttgttttatagaatgcggctgccgcgtcaaaataacctctcatattgtactggttattcatgcggatgacattgactgtcctgccggcaacaaaacgattcagcttttccatatactcatctgaagttatggaaccctccgcaacataggtgagccccttttcccagctggctgtcagctccggattcagaagctggcggatggactggtccaccacgtcatagaccatttcccctaaaagggacggcgtaataacctgggttttcttgttcaggttcagatacttgatgttaaacagtttcttaagtatctcagccctggtagcgctggtgcctatgccgctgcccttaatctgggcccgcagctcctcgtcctctatgagctggcctgcattttccatggccagaatcatggaaccggaggtatagcgcttgggaggtgatgtctcgccttcctttatattcagctccaccaaagtaagtatatcattttttttcaattctgcaagcatctggagcaatactgtcctgtcaacttttggagaaatggcatttgggacaccttcttttgcctcgtccctggactcatcccttgtctcatcctttgtctcatccctggcctcgtcaaaggattcctccaccccatttttctttgccaggttcacatccgccaccttgagatatcccggttcggacagaaccttaaaattggcaaaaaaatgttccttcaggcgctccagctccaggctgtatttctgataaaccgccggaggataaaatatgctcaaaaaccgtctgcatatgacctgatacaccttttcagacaatggcggcagtcccctcaggtttccaagtccctgtccggtgggcacaatggcatagtggtccgttatctgcttgtcattgacatagcgtgtcttggcaatccccttataggatcccatattcagcacctcatccgcaaaccctgccataggcccgtaattcttaaggccgcctatgttcttttgaatctccttggacactgccgtggacagaaccctggcatcggttctggggtaggtgaccatctttttctcatacaactcctgcaccaccttaagagtctcatccggactgattttaaacatcttggaacagtcgttctgaagctccgccaggttgtaaagaaggggcggattcttggtctcctttttcttctccttggcgagcaccgtggccgtgagaggcggctctgccgtcaacaaggcggccagctcctctgcctgctgcctgtccttaaagccgttgtccttatacaggcagggggttccgaaatagcgggaaccttccactgccttccactccgcctcaaagggaaccggctggccgtccttacccggcgcctcaaaggatccaatcaccctgtaaaagggggttttgacaaaaccgcgtatctcccgctctctgcgcaccaccattcccatgacacaggtcatgaccctgcccacggacagaaccgtaaacttggttcccagataatttgacagggcaggtccgtacttaagggtcagcaccctggagaaattaattcccataaggtagtcctccttggcccttaaataggcggaggcggacaggttatcatactctgtctcatccttggcctcgcggattcccctcaatatctcttcctctgtctgggaatcaatccacacccgtttctgcttcttatcctttaccccggccatctgggccaccaggcggtatatatactctccctcccgtcccgagtccgtacacacatagatggtatcaatatcgggccggttcaaaagacctttgacgatttcaaactgcttggatacattggttataacttcatacttgaattcctttggaaggaatggcagtgtctgaaggctccagcgcttgaacttcatgtcgtaggcttccggataactcatagtcaccagatggcccacgcaccacgtcaccactgcctgatcagactctatatacccgtcgccccgccgtccccgtatcttaagcgcttcggcaaactgctgggccacactgggcttttctgctatgtataatgattttgacatccaatccctcatttactttcttcatacgcgctgccccggatttctccggcagatttccatggcggcagggcgcatattataatagtataccattaaattgcctttgccgcaatcaaaaaaaccatgaagcgccagcgatggcagaaccctcatggttttcctgcataaactactataacgacattccggaggtgacttccatgcctggaagctggcagtatcagccttatctcaccacatatgattcatttatcttttacaatgcaatcggggaacatcccgattacttctaccggcccatcgccgtggcgaaacaggtggtaaacgggaccaactaccggttcatgaccatagccgaaccggagcagtcagatctgacgccccattttgccatcgtggaaatctatcagccccttgaaggcagggcctatgcaactaaaatcacgcctgtttaaccaaaaattgatagacggtcctggttctgtactcgtcccctgctttcagcaagggggacgggaactggggcttgtggaccgcgtccggaaaatactgggtctcaaaacagaaggcgtggcggtaatcatagcgggcattgccctttcccggcatctcatcctgcaggaaattagctgtataaaactggattccgggcaggtccgtataacattccagcacccggccgctggccgggtccatggcctttgcagccagggccagttctccttcttctttatccagcacccagttgtggtcatatccctttccgaataccagggcctcaaaatcagcgcctatatcccttccaatagccttcatctctgtaaagtccatgggagttccagccacaggagcaatctctcccgttggaatggaaacctcgtccgccggtgtataccgggacgcgttaagccacacctcctgcttcatcacgtcgccgctgtcatgtcctgccaggttaaaatagctgtggttggtgaaattggcaaccgtatccttatcgcagaccatatgataatccagcacaagactgtcctcatctgtcagggtatagctcaccgtgatcctggcattgcccggatatccctgatcgccgtccgggctctccagataaaagtccagcctgctgcctgcctctgtctctgaggcggcgcagtcccagaccctgtcgtggtacaggtccggtccgctgtgaaggttgttggggccgttgttggcctccagcttataatccttaccgtctatggtgataacagctccgccaatccggttggcattgcggccgatgggcgcgccgaagtgggcaggattcctgcggtagctgtccaaatcatcgtatcccagcaccacatccgccatgctgccgtccttatcaggcaccaccatggaaacccacacgcctcccagagtgatgaacgaagcagataccccattcttattggtcagcgtatacttgtaaacctctgtaccgtcgggcattttcccgaatgaatttttctcgattgccatgtttttctccgctccttctccatgcagtactaaatatatccccttgccgtcaaaagctctgcgcagagtacggctccgcctgccgcgcctcttaccgtgttgtgggacaaaccgatgaatttataatcatacacagcgtcctccctcagacggcccacggaaattcccattcccctctcaaagtccacatccgctgtcacctggggacggttatcctcctcaagatactggatgaactgcgccggggcgctgggaagcttaagctcctggggaactcccttaaactccttgagtttctcaatcaactgctcctttgtcacctttttcctgaacttcacaaacacggcagccgtgtggccgttcagtaccggtacccttacgcactgacaggtgatgacaggactttgtgccttcactataaccccatcctcaatggttccccacaggcgaaggggttcctgctcgctcttttcttcctcgccgccgatatagggaatgatgttgccttccatctccggccagtccttaaatgtctttcccgcgcctgagatagcctgatatgtagtggccaccacctcgtacggctcaaattccttccatgctgtcagcaccggcgcatagctctggatggagcagttgggctttaccgcaataaatcccctctctgtcccaagtctcttcttctggaagggaattacgtcaaaatgctctgggttgatctccggcactaccatgggaacatccggcgtccagcggtgggcgctgttgttggataccacaggcgtctccgtcttggcatatgcctcctcgatggcctttatctcatcctttgtcatgtccacggcgctgaatacaaaatcaactcccgccgcaaccttttccacctcatttacattcatcacaaccagccttttaacagcctccggcatgggggtagtcatcttccagcggtctcccactgcttcctcatacgtcctgccggcagagcgggggctggctgccactgtcactacctggaaccacggatggttctccaaaagggcgatgaaacgctgccccaccatacctgttgcgcctaatattccaaccttcagcttcttttccataaatcattctcctcattatcctgattttcccgccctccggaactgtcacggaacctgtcgtattaaatccatgacagtcacattaaatcgtagcctcattgaatccacggtacggcgaatctttccctatcctataccaaacaacggaaaaaatcaagatttattcgctagaaaaatacatttgtgcgccccacaaggacattctctcttttttgtatgcaacactgccattgggtcaggaaaccagtgacaatgccacctccatcatctgtgtaaagctggtctccctttccatggctgaggtggcttccccggtgaccatggaatccgagatggtcagaacggccagggcattgacgccggccgccgcagcgttggcatagagggctgccgcctccatctccacggccaggactcccatgtcagcccaggtcattcctccctgcacctgtttgggcggggcatagaacatgtctgagctgagcacattgcccacatggaaggacagtccccgctccctggcagcggccacggcccgctccaacaggctgtagctgcacaccggcgaataatcgcccggcagccccaacaggcgcacaaaattgctggtgatacaggctcccatggcaaacaccatgtctctcacatggacgtcaggcgtcagggccccggccgtgcccacccgtatcaggttcttacagccgtaaaagtgaatcagctcataggaatagataccgatggagggacaccccattccggtgcccatgacagataccggcctgcccatataagttcctgtgtagcccagcatgtttctggtcccgttaaactgcttcacgtcctccagaaaatgctccgcaatatactttgccctcagggggtctcccggaagcaggattgtctctgcgatttctcctttttcagccccgatatggggtgtgggtgtgttggataatgacatggcatatacctccttttctacagccgcactttgctgcctttcccgtccctcttggccagtttcagacggtttaaatggacttccttacccttgtaatccacaatgggattctcaccaatcagatacagcttctccagctcctcattcttggtcagccggatgcctctgacacctctggatgcctttttaagcatggatatctcctccagggcaaaccgcaggaacacgcctcctgttgtctggatcaccacctcggtctcgccctccaccggtatcacggccgccagttcatccccctcctggagcttggtggctgccaccacccggttgttggtctcaaattcctccgcaggcacctgctttaccatggccattttagtggcgaatacaaatatcctgcccttcatgtcctctgcgctggtcaggtaaacaatggtatccttggcaccgtcgaatttactcagattctcaatgggtgttcccttatccctcagcttgccggccggcacatccatggcctttatctggtaaaggctgccgctggcagcaaagagacagattttatccgtattcaggcatttcaccacgtggacctgctcggtgtccacggtttcctggttccggtcataggtggacttatccaacagcttgcagtatccgaaccggtccatcacaaagaccatctcctggacagccacagcgctctcgtcgtacaccgcctcaggtccgtcctcaatcagggtgcgcctgggagtggcaaactcagccttgatggcagccagatcctccttgataacacggttcatctgggccctgcttcccaggattttcttatactccccaatcttccttaaggtctccctgtgctccttttccagagccaggatttccagtccgattaacttataaagacgcatttccagaatagcggatgcctggcgctccgtaaaggcaagcttctttgcgtcctcctcaaaccccggaaccttgaaatggatgttggtcacatcgcctgtggtcagacatgccttggcatcctttaagtttttggagcccctcaggatggctatgatcaggtcaatacagtcgcaggccgcaataagtccttcctgtacttcctttttatccatttccttctgtagtaagacattgtatttgcgctccgtgttctcatactggaagttgaggaaatttctcaggatccccttcaggttcagcgtctcaggacggccgtccgcaatggccagcatattgaccccgaaggtatcctccagctttgtctttttatagaggatattttttatcttgtcaatgtccgcatccttgcgcagctccagcacgatgcggattccctctttgttggactggttggagatatccaccacgtccgtcagcttcttgctctccaccagatcggccacatccaccagaaacttattgattccggcgccaatcatggtatagggaatctctgaaataatcagcttatccttgtccgccttgcgctttccaagctccacctcgaacttgcccctgagcttgattttacccatgccggtctcgtaaatttggggcagctcgctcttattggcaatgactcctccggtggggaaatccggccccggcataaactccatcagctcctgagtggtcacctccggattatcaatgtacgcctggaccgcgtctatcacctcgcccaggttgtggggcggaatgcttgtgctcatgcccacggcaatgccctccgccccgttgattaacaggttggggaccctgacaggaagcacctccggttccttttccgtctcgtcgtagttgggcacaaaattcacggttttatccagatctttaaggtagacctcctccgcaaacttctccagacgcgcctccgtgtaacgcatggcggctgccccgtccccttctatggagccgaagttgccgtgtccgtccaccagggccatgcccttcttgaaattctggctcatgacaaccagtgtctcatatatggagctgtcgccgtggggatggtacttacccatggtatcgcccacgatacgcgccgatttcctgtggggcttatcgtggtccagatggagctccctcatatcatagagaacccggcgctgtaccggttttaagccgtccctggcatcagggatggcccttgcagtgatgacgctcatagaatagttcatgtagcttctctgcatttcctcactgtattcagtccgtaatatcttttcagccatgttctaattgtctcctgtctatgcgtcaatctccgcctcgtccgcatgctcataaatgaactggcggcggggtcccacctcggtgcccatgagcatctcggttatctccgtagccatcctggcatcctctatctccacccgcttaaggacccggcgctccgggtccagcgtggtctcccacagctgctccgcgtccatttcacccagacctttgtagcgctgcagcgtaaagtcgccggtatgggttttcctgtaacgctccagctccttttcatcgtacagatactgttcctccccccgcttgggaatcaccttaaacaagggcggcatggcaatgtacacatgaccgtcataaatcagttccggcataaagcggtaaaggaaggtgagaagcagggtgtcgatatggctgccgtccacatcggcatcggtcatcaggatgattttgtcatagcgcagcttggtgatgtcaaagtcattgccgtatccttccgaaaaaccgcagccgaaggtattgatcatggtcttgatttccgcattggccagaaccttatccatggacgccttctcaacattgaggatttttcccctgatgggcaggatggcctgatactggcggttcctggcagtcttggcagagccgccggcggaatctccctctacaatgaatatctcacaccgggaggcgtcccggctctcgcagtttgccagcttgccgttgctgtcaaaggaaaatttggacttggtcagcatgttggtcttggctttttcctcagcccggcgaatcttggctgatttttccgcacagccaatgactccctttaatacctccacgttgcggtcaaaataaagctgcagctcgtcccctgtcaccgtgaacacggccttggtggcgtcggcgctggccagcttagtcttggtctgtccctcaaagatggggtcaggatgctttaccgcgatgacggccgtcatgccattccttgtatcggctcctgtaaagttggtgtccttatcctttaaaatgccgatttccctggcatagctgttaatcagcgccgtgaatttggtcttgaagccggccagatgggtgccgccctcctgggtaaagatgttgttgcagaagcccagtatgttctcctcaaatgtgtccacgaactggatggcggcctccacctccaccttgtccacggttcccttgaaatagatggggtcgtgtaccggcgttttgccggagttcagttcccgcacataggcaacaatgccctccggctcatggaaggccaccttctctccctctccgggccgcttgttttcataataaagggtcaggttgggatttaagtatgctgtttcgtgcaggcggctcttaagccagtccgccttgaaacgggttttctcaaatatatcgccgtcaggcaggaaattgatgcaggtaccggtctcccttgtctttccaatcacagggagaagtccgttctccagcttgatgacaggacgtcccttttcatattcatcgtgatagatgcagccgtccctgtaaaccttaaggtccatatgggccgacagggcattaactacggaggaacccacaccgtgaagtcctccgctggtcttataagcgtcgttatcgaatttaccgcctgcatgaagggtggacagtacgattctggccgctgatatgccctttttgtgaagccccaccggaataccgcggccgttatcacggaccgtgcaggaaccgtcggcttccaatgtcacccacacactgctgcagaatccggccaggtgctcatccaccgcgttatcaatgatttcataaatcagatggtttaaccccttggagcccacacctcctatatacataccaggacgcttacggaccgcctccaatccttccagcaccgtaatactgtccgcgttatattgttcctttgccattctattcctccatattgctatgtacagatgcgtacatatgtttcgtcttatagtattaaaccatatttagattgttttggcaagttccggccatgagaaattcccgtatgcatacggattctctttagtattcggaaggtccgggaaaaaatccggactcaattcatagaaatacacagaaatcattacggatttttacaaaaatatgaaaatacacttgaattttccaaaatacatgatataatatcagtgttgtgcagatgtagttcatcggtagaacaccagcttcccaagctggggaggcgggttcgattcccgtcatctgcttttaaggccctgtgtgtgcagggcttttttgctgtcctgaatacgtttttttatcttctgctttttctttccgcaagacaataacaggccgcccggtccgctgtggccgggcagcctgttattgttataatccatcttttcattttttgctttttctattcttatccttcatgaaatccggctttctacagcaccttatccagaaagctcctggtccgttcctccctgggatttccaaacacttcatccggggtcccttcctctacaatgtagccgtcatccataaacaccacccggtccgccacttccctggcaaatcccatctcatgggtaaccaccaccatggtcatgccgtcggctgccagctgtttcatgacctccagcacctcgcctaccatctcaggatccagggcggatgtgggctcgtcaaacagcataatgtccggattcatggcaagggaacgcgcgatggccaccctctgcttctgtccgccggagagctgtcccggataggcctccgccttgtccgccagccccacccgggccagcagttcaagggccttcctgccggcttcctcttttcccataagttttaattccgtgggagccagtgtaatgttctccttcaccgtcagatgagggaacaggttaaaatgctggaacaccattccgatgttttcccgcactttgttgatgttggtgttagggtcggatatgggatggccgtccaccaccacatggccggatgtaatcttctccaggcggttcagacaccgcagaaacgtacttttgccggaaccggaggggcctatcatgcatacaacttccccctctcttatctcgatgctgatatccttgaggacttccagctttccgaaattctttttcaggttatggactgaaatcttattttccataggacactctcctctccacatacttggcaatcctggacagaatcgtgcagactaccagataaaacagggccacgcagatccagatgggcataaccatggaagctgaattggctgcaataatcttgccgttctgggtcagctccctgggtccgatgacagacacaagggatgtatccttcagggagatgataaactggttgataatggagggcagcatggtcctgaatgcctggggcagaattaccttgcgcatggccttgccgtaggaaagtcccaggcttctggctgcttccatctgtcccttgtcaacagcctcaattcctccgcggatgatttccgccatataagcgcctgcattaaggctcagggccacgcagcccgccgtaaaggcgccgcctatattgctccactggaaaccatatggcttcaggacgcttcccacaccgtacatcataatcatgacctgtaccagcaggggtgttccgcggataatgtcaatatagacatcggcaacgagttttagtaccttaaaatccgagaccttgaacaggccgaaaataacgcccagaaccgtggcgcagagcagagatatcacggtcatctgcagggtgattcccagagccttaaaaaatgatgggtaatactgtgttatgatgtttacaatctgcatactatcatccttttctgattattcgttgacgtgcatcattccagggatatccttccatgcccatggaatgttatagccaaatttaaagcacttaagcataaccggtaaaaaaccgtataattgctttaaattcatccataacctgccggcattgaggcgccggccctgcataaggcaggaaccggcgccgggcagcactgcccggaggttctccggcagtcctattttgcaatgtatgtattcaatatctcatcgtatctgccgcttgccttgatgttctccagtcccttgttgaacatctccaccagttccggatttgcgccctttaaggtcgcgaaaccataggaggaacctttctccatgggtgtgggaagggtgaggcccagtcccctggaaatttcataaccgataacagggtaatcctcaaagcaggcaactgcctctcctgctataacggcctgatacatgtcagatgagctctcgtactgtattacctcaaaaccatactgctctgcaatggactctgcaaaggtacatccctcggtaccaatcttggcagccaccttctggtcctttaactggtcataggaggtgatatcggaatcagacaggacagccatgcctacgccggaatcatagtagggctctgagaaatcatatttctgcaccctctcatcggtgatggacatgcctgcaatcacgccgtcgcactcaccggcctccagggcagttacagctgcggagaatcccaccggaaccacctcatattcaaagccctggtcctgggcaattgcctgtaagatatccaggtcaatgcctaccatctctcccttttcattttcaaactcaaaaggggcaaaggtggtatctgtgttgatgatgtacttcttgcctgaggccgccgcgctggtttcctcttctgctgctgattcagctgccgtggtatccgcgtttgctgcagtctctgctgctgttgtgccggcggctgtggtctctgcgggcttggagccgcatcctgccactgtcaatgccatgatggcagccatggataacgccataaatttcttcataattacttcctcctctactgatcgaaataaaataagggtgactttaataaacctgtctcccttgacctgtgatgcgcctgcatcatcctgattactatagcacaaagatatgtcaaagtcaacttgttgtaatagttacaattaaataactgtaccatttgtgcagaaacaggaccgcaccgtacttctgcccaatgcggccccggttattccagaccttacctgccttatcttccgactatttcccgctatttcacaggaaaacgctccacaattgcccctgtatgataggcctccaaaagcatttccaggtctttaatctttgtcttaagctgtttgcccacatccgtgtctcccaccagcttccggctggacacacgttttacaatggtgctctccgagtgtatgtcgctctccttctcaattgcggcctccgtggactcaaaaggctcatgggccgccagaatcaatccgtaggaattataaatcagggtatatcccgcgattccagtctctttctggtaagccctggaaaagccgccgtcaatgacaagcacctttccgccgcattttacaggattctccccgttcttggacttgaccggcacatggccgttgacaatatgtccctcctggggcggcaggccgaactcctccaggatgcggcccactgtatcctcatcctccagcatggagtaatagggattcttttcttccctgtgggtctccttgtccgccagaaaatagcgctcaaaggtagccatcttatcctttccgaacaagggcgaatcctgatggagccagatataccagcatatatccctgccttttgcccgctctgccgggtccactgccatgaacgcctttctcacataaccgtccagacactcatagaggcttttgcccttgtagttctgcccgtatatatccaccgctttaaagctgccgtccctgtttaaggggatgcagccgtgatacagcaggtttccgttgtataccttgtaaaggcttccctttgccagcaggaagcgcatatgctgctgaagcttttcacagttctgaaatgcggccgcaaggcgttccatgatggcgttctcctccgccgtaagcctgtaagggtcagccggatccatggtgggaaaatggctgtccagcatttcctgctcaccgccttccagcagtatggttcccttgtctaaatctatgcggtgcagcaggttccggtcttccaggcagaactccggatgttcctttatgatttggccctccaccttgaactggataatggatatggccttgtgcatcctgatattcagttccgtctcactggggctgcatgcattcgcccctttgagctggaagcaggcgcagggatcgctcccataggtgtccagggcaaaggttgctaacggcagcagattaataccgtagccatcctccaggatatccagattgccgtatctggcacagatgcggattacatttgcaatacatcccttctgaccggcagccgcccccatccacagcacatcgtggtttccccactggatgtccagggaatggtaggtcatcagcttgtccataatcatgtggggccccggacctctgtcataaatatctcccagtatatgtaaatggtccacaataaggcgctgtatcagttcacagagagccacgataaactccccagctcttcccacccggataatggtctgtatgatggcgttgtaataggactctttgtctctcacatccaccttttccgtaatcagttcctcaatcacataggcaaactcctggggcagagcctttcgcaccttggacctggtgtatttgctggcagcccgcttgctcacctcgatcaggcggtacagggtaatcttgtaccagtcctcccggttctttacatgctccagtatctgggccatcttctccctgggataataaatcagggtggccagggtctgcttgtcctggcggctcagggtgttgccgaacacatcgttgaccttgcgccgcacggccccggatccgtttcgcagcacatgggaaaacgcctcgtactcgccgtggatatccgtgaggaaatgttcggtccccttgggcaggttaaggattgcctccagattaatcacctctgtggaagcggctgctatggttggatataattccgcaagccgttccagataccttgtctgcaaatcactcattgctttcctccctcaatacttatatgttttttactcctccctctctctgtcaacataatgcttgttttcttcgtcaatataatccaggctcaggtaatcctctgtcctggcggataaatctttctttctcagcgcgctgctcacataggtggcggtcagcctgtaaataactgcaaacaacggcaccgcgataatcattcccacgaatccgaacaggccgccgaacagcaggatggaaaacagcacccagaagctgggaagccccgtggaatcccccaggattttaggccccaggatgttgccgtcaaactgctggagcaccaggatgaagataaggaaatacaggcatttcatagggctcaccagcagtatgagaaatgcgctgggcacggctccgataaaagggccgaaaaaggggatcacgttggtcactccgataatcacgctcaccagaagcacatagggcatctttaaaaactgcatggcaaaaaagcacatgatgccaataatcagggaatccaaaagctttccggttataaaaccgccaaatacagagtgggcaaaacgcacctcgctcaccagccggttggcatccttaagctttaacaggctgtagacgatcttcttgctctgggcggacaaggtatccttgatgttgagaaaatagaccatgacaatgacgccaatcagtatgttcttgacaacggtgaccacacttaagaggcccgtggaaagctcaccgatgattttagacatattgggcaccaggtccgtggtcagccagttctggaactccgtggcagcctgctcataaaagggcataatggtctgttctatggtaggattgtcctcaaacatcttcataagccagaggctcaggttattgatgttctctcccagactctcctggaggccgatgatactggtgtaaatctggggaatcaccatccagaacaatccgcagacaatggcaatgagtaacagcaggctcaccagcgtcccggccgcctttgccaggctgtctgccgtgtgtccgtccttgatgcaacgtttcagtttttctgctgtatagaccctggtcttgttatagatgggcagcatcaggtaggccagcacagccccgtagataatgggcatcagtatggatacgatttttcccacggcccttgatacaatctcaaaccgggacaggaaaaatccaaaggcaacactgcaggccaccacggccagcgcagtggtgccccagtatatataatttttaaatcttgggtttttcatacatctttactcctatgtcttaagtattccgtcatttcggcaagtcattcacccatatatcatatcataagctgaaactaacagcaattaggttttatattacagtgtatgtcccgtgaagattttcacgaaatcttaacagagaggacaaagcaggatttttgtggtatgatattcctatctttgaaaagaggtgttgagacatgtcttatatcataaaaatggccctggacatcaaagccggttttgagcccccggcgcccatgacatcccccttagaagcctactgcgccgtcggcaccattgccagggccatgaagttaggaatgccggagagaaaggatacactttttgagatgcgtgaccagctggatggggatatggggggcaatgagcctgaggacagccggatagccaggatacacgccatcctgaaagacttcatacgaaatgaggataccacggaccagatgatggaatatgtggcatatggatatgaaaatgaaaggtgacagaacaggccacaaagtggcggggtaatggagcttaaaagaatgcaccggccggaaagacgaataatcgagtaggaggcggtgattaaccgccgtcctctcacaccaccgtgcgtaccgttcggtacacggcggtttcaacagttgacgtgcactgactgataagctgtggctaaatcataaaagccactgcttatcagtctttcttttgtcattgccatatttaccgctaccgtttgcgtggtaaaccaatatcctctcctgctgtttcctgcctgccatgccaaatcttccggcactcccattttccgcaggttcttcaccttggttctcggtttcttccattgtttccatatacacattcggattctgtggtatagccacttattgagttcttctattcggttcttcatttccgcaatcccgtaataattcagccagccacacatatacacttttatctttgctaatgcagggcgtatgctctgaacagaccttcgggaactaagttctttcagctttgacttcattttcttccatgactttccatgaacccggacatatatgccctttccgttctttcccaatgtaaagccaaggaatttaaaagttcggattgcaaacacgctgactacacggcttttctcttggttcactttcaatttcagcggcccttccagatatttcgtgctcgtctccatcagtctcttggcagctctctcgcttttcgccagcagcacgatgtcgtccgcgtaacggacaaatacaactccacgcttctgatactcctggtcaaactcattcagatagatgtttgccggcagggggggaagatttcctccttgcggcggaccttcttctgtttccatgactactccgttttccatcacgccactctttaagtacctcttaatccactggattaccctttcgtcccccacatttctgcgcaggatattcaggagtatctcatggttcagggtatcaaagtatttcgacaagtccaatgctaccccatggatatatccctgctctgcatactctttcaccttctgaatggcatctttcgcgcttcttcccgggcgataaccgtaactgttctccgggaacaacggctcgtagaccggtgtaaggcgctgtgttatggcctgttggaaaatgcggtcttttacggttggaatacccagctttcgtattccaccgtctggcttgggaatctccactcgtcttaccgggtctggggggggtgctttccccttctgattctctcgataagttctttctggttttccctcaggtatgcgcctgtttcctccacggtaatcccgtcgattcctggcgcccccttgttcgcctttactctcttaaaagctctgttgaggttgcccttctccagtatctcctccaagagttccggctgtgcactgtccctttccttccatatccggcggaaagaacggtgcgctctcacatacccttcacgttccgcgctatctctttgcgagcagctgtctttgttttctgtacccaatgttccttcctcctttcccagttgtactaaagactcctgttgattcggtccttcatctcccgactactacggcctcggctgacttctgtacgttcagcactatctttcgataatggttatccctttcaggacattccgcacagacctccccgggtaccacacgtccctttctctccatctatctgccacatttaccatacgtgattccgtgtggttattgggcttcgacttgttcagcagccttaccctcacgcatggcctgatgtgatttctgtccgtcagaccagagatttgcccatgggttagtatgttccccacatccggcttccttcagatttcacctcacgatgaacacccctgccttcggctatatccttcccaccaccgggcggattccggactttcaccagttagagacgtgcgccgccgggcgcactgaaaagcgaacggggtaatgccgtaatggcactgccccgtttgttctatataaaatatgtccccaaattttccccttctcacattcccaatatggaatccgtatcagggcggatgatattccaggcggaaaccagtgcctctttcagctttacctcacctgcaaactctttttgtctctttaaagcatatgctgtcttttcttccggggacagtatatagtactcactgtcgtcccggtatgtatcgctcaaaaagatatagtttctcgaaggcggcctccggtaggcaatatcggctatagaccattgtacatgatatccctcgctgtacacctcattataatctacaaaaataatgatgtcctccttcttgtcggtctggtactttaacgcctctattctcataaatcccacccttccttgcagcagccggcccttgctcatccattgcccgtgcagatgtattaattaaaatctaccatatcacccgggatttttcaatacaatttacaaggttaggattaaagttacagaaaacggttattctctgcggctccggtctatagtacagctgtattatcagacctttacagccagaccgtcataccttcacgtacatattcgcagttaggattgcaaagcgtggcctgcctttccagacagaacaaggtactgctgtccgcttcccagtcaaaatgagtaagccagatccgtttcgcgctgctggcttctgccagcttaagagcagcttcccatgtggaatgtccccatcccttgtggaagatatagtcttccggtgagtactggacatcacaaatcagaagtccggcattctcagcatagtttgacagcacatccgtcatctcctggtttaattcacagtcaagtccatagaataccatggtttcttctagctgtatccggtacagcaccgtctggtccgggtggttggaacggatggggagaatctgtacggactgcggcagcggcaatgacaggattttcccgtcctccacttcatagtactcaatggacgcactgcattggctgagggaaacaggccaataaggaggccctataaacaggttcagctgctgctttaaggaacagccgttgcggctctctccataaaaacagatgcggcgtccagtctgaaatagtggcttaaacagcggaattcctataatatgatccaaatgaaggtgacttataaaaatatggatatccctcttgtcatccggatttttcatcatctcccggcccagtgccgccagccctgtgccgccgtccagaaccagaagcatctgccctgtctctatggtgaagcaggaggtgtttcccccatattccatctgctctgtgtaaggagccgggccggatccccggctcccccagcaggtgacttttatattattattcattttacctactccgtattgtcattaatgtccggcttccggtatttcttccatagattccttatcccggcagatttccatacgcttccggtttacctgttgcaggctggttttgcccttttccggaattccttctactggccggtttgcgccttcttcagaacttccttcttccggctggtttctgccttcttccagacttccttcctctggctggtttgcgccttcttccggacttccttcttccggctagtttgcgccttcttccggacttccttcttccggctggtttgcaccttcttccggacttccttcctccggccggtttccgctttcttccggacttccttcctccggccggtttgcgccttcttccggacttccttcctccggccggtttccgccttctcccggttctccttcttccggccggtttccgccctcttccggacttccttcctccggctggcttccgccctcttccggttctccttcctccggccggtttccgccctcatctggttctccttcttccggctggtttccgccctcttccggttctccttcttccggcctgttttcgccctcttccggttctccttcttccggccggtttccgcccgcttccggacttccttcctccggctggtttccgccctcttccggctctccttcctccggcaaattctctccctcctgtagctctttctcttcctcattcacatccggcagtttttcagcatctgcctgaagagggatagaagtatgcacctctgcctgttttttttgttcctggacaataccagttaaaacccagcccgtctctgtctcttcgctctcaaacatggactctgtcaactcttcaattttatattcctctccatccatttctaaaatacctgtgccggttataaaaggaatcccatcatctgacctttccaagataccgctttgtacattcagcttataattttctacaaagattacccctttgactccacgttcagccaaaacctttcctccctccaggttcagctcttcatatgttagattctctccatcttgtttctttactgcggtaattcccccgccgtaaaatcctcctgttaccagaatactgctgtcttccagtgaaagcatcccttccacacacaggttatcgccaaattccccgtcagcgtttctgactgtcaaatcaccatgaaacaatgtagttccggtaccgaaatcaaaggctgcattatcaataacagcttttctctccacctcaagtcggccctgtccgatagtttggaagctgccgccttcctgcataaaggaaccatttgccgccactctccctttattattcagtgttccgcttcccacataatctcctttaatatccagggtattcatactggtattcgttacagttcctctgttttccaggtttccgtccacaatcaaagttccgtccacctgcaatgctgccgacgttcccaccaccagccccattcccccggctaattccagccggctgcctgccggtacggtcaggctgttatcaatgataaggggattgctgtccgcagcgctgtgaagaaccacatcagatgtccgcagcttttcctctatggtttccgggctcaccggcatagtaagctccaccgtaggtctgcccggctgtgtgccggttccggaatcagaaccggaatcccctccgttaaaaagaggggtgtgaatatctttcccaccaggcttagaacctgatgttccctgcccattctctgcccattgggagtttttatcctcttcttcccttaaaagccgctccgcgttttcaatcatccagtccacatcccagcctgcctctctcagccttctggcgagctcctcattttcatggatttcccaaagcacataaggggcaatatctgtttccgtaaggggaagcgtctgtatctctcccttccgctccatgcggtcaggaccgataataagtgcctgccggcccttctctatgtactgcccattccggtcaccctccacaggattcaccggtcttacaagaacctgcccctccaggacgcagacgcggctcgtattgctgtcaaccacttccgcgtatactaccgttccccggattccggttatcatggtagaggtgcggatggatagggactcctcccccttaagaggcgcggttacatcacagagaaggcttccttctgacagaagcagctccagctgctttcctttcttccggatctctcctttgctcagttcatccatcttcacggcctttacgtcatccagggcaaggcctgcgtagcttgcagcctctgtttccaggtaatatccgctctggagccgcatgttatcaaaggccgcaaccgcctttcctccttttcccgacacatttaccgtgccctctctggaagaaagacgcatggttgccccgcttacagaggtgtcggctgccgcaggtaacacattccctgccagcagacagcaggacaccgcaaaagcagccccgcatcgtatcagatttctcccgcgctctctcatataccatcacctttccaatacttaatccgccttcttaccctctgacaccggcattctgccggagcttccttccgcaagcccttccagctccagcacctgaaattccccggcttttcccttcagccggatgctgcctatggcctttgcattaatccttccctccagcgcatttgcaacagctgcggatatgtaaatctttcccccgggggcattggactccagcctggaagccgtatttaccgtatccccgatggcagtatagtccattcggtcaggcgcccccacatttcccaccacagcgggacctgtgtggattccggttccgaaggtaagcctgcgcccgaaacgtgcctccagctgatcccccaggcggtccgcctcttttgccatatccagagcagccaggacagccttcatcacataatcctcctgtgccaggggcgcgccccagaaggccatggccgcgtccccaataaacttgtccagggttcctccatggttcttgatggaggatgaaaccagggtaagataactgtttaatacctccaccacttgtcccggttccaacgcctcagacatggaggtgaatcccctgatgtccacaaacagcacagccagctgtgtaagctttccgcccagctccagagactgggttccctgcctcagtatctcatccacaatctccggtgctgcataacgtttgaaggtggccgtcacccgctgtttctccaggacagcctttccataatggatcaccaccgacgccccgaagaaaagggtcaatcccaggggaatccaaagaatacgcaggaccattcctttctcataggcagccttggcaatgattacatatgcgaaagagccagccagccacactgcccctccccctgccagccggctgctcttaaaccacgcgccggctgccgccagcaccaggaacagaaccgccagctggatgccagcgcctggttcctccttataatcaccctccagaagcgcatgtatggcattggcctgtatctccacgccgtacatggggtctcccctgtctgcggaggtaatatactggtctcccagccctgcggcataaggccctatgagcacaatccgatctgcaaaatattcaggcggaatattctcttccaaaagatccactatagaaatgaactcactgtaatcctccggcagcccggaataattcaaataccagaaacccctggaatccacaggcggaagaccggcctcccggcctccttcctgttgtatatacttccttgctatggtcagggcaaaggagggaaatacgcgcccgtccggcagcccaagctccagcagctggtggcgcaggatgccgtccttatcatacattgcattgatatgtccctgggcggtcacgtccctcagggctttgtaaggttcatcaaaggacttcacggtaaaatcatccagataaaaggtgccgtccgccgctgtaaccagagaggaaccaaaggttcctgctgctgcggtgaccacattttccccggtccccgcagcctctgccagaagtaaatccccttctgtcccggtttctcctgccagaagtacatccagtccgataaccgcaggacggatatccccctggttcagataggaaaccgtctgtgccagtatccgccggtcccaggtgccaaaaggccccagctcttcaagggatctctggtcaatacccacaatggcgattctgccgtctgtcccccgccgctcctgatacagcgcgtctgacagacggttatccatctcatagaacaatcctgacgcggccgctatggtaaatatcccggcacataacccccagggcaggtacgcctttatcaattttttatccatactgcctcccatctattccctgttatctgggcagcacaaacacctttctcaaaaaactgtcgcacaggtaaatatgatcccccattaccatcatcccctccggggacgcgatggtcagatccgggtccgccgcatcggcggccggtagggtggaaacattgtccccccatatcttccgtaccacactgttgcctgtatccgacacatagagggcgccgtcctccgccgcggtaattctctgaggtcctgaaaacatggcctgcgacacagggccgtccgcaaatccgtcctctcctgttcccgcgctccagaccacggctccgtccatagccttcacaatccggttgttgcctgtgtccgccacatacagcgcaccttcataaaagcatatgcctgttggcgcggacaggccccgcagataggtacccaccttcccggacagggacaggctgcggactacgtcattatccgtgtctgcaatataaagtattccgtcaggtcccgcagccaggcccgttggggcggcaaacaatgcttttgaggccagattatcctcataacctgcttttccggttcccgccgcggtcatggcgccctccggggaaatatagcgcactacatgattgctcctgtccgacagagcatatccatccagataaggaatcatatcccagggctcgccgataagcatttccccaaggcttccgtccctgtagccgccacggggttccccatacttcccggcagctcccttctgccccgcatagatactgcggccttcctctgtcacctgccagattaccttgttaaatccatccgccgccagaaaacatccctcccggccctgtaccatgacccggggtgagaagccatcccctgtattatcaaaaaagggagcggcacccgacagactcacccccagaatgcatccggaacataccaatgacaggacaaagcccagcgccttcgtcccacagccggtcattccacgtcttttccagatagttttcatttacctctctccctttctttttatccgaggaaaatattccgccagctgtcttatatccaaaggatactgccggagacaaagcacagccactgagattccgattactccataaaccccaatcagtgccggggatgcgaaaaggaccatggaaatctgctggctctcattggcaaaccacaccggcagcgtcattatgttataacccatatgaagagccaccgcataaataatattgtcctccacaatggatacatgagccagcagcagacccataaaaagtccgtacgcaacccacaggggagttacatggcaggccgcgaaaatgccggtacagagcagcactgcaaacgtctgactctcaaacctgcgcaggaagcggttcagcacatatcccctgaatatcagttcctccaccaaaggcgcaagaaacataaccgacaggatagccaaaatcttatctaccttaccgaacacttcataggtcatctcgtgataagggcctataagaaagtcgggaaagggaatcaccgtaagggcggcggacataaaaaggttaagtcctgccccggctcccataagcaggaaaagcttttttgcgtttacccctctccagtaaagagtggtttcatcccagatggacactccgcgctttctgcatttcctccgcatcagataaaatacaagaatcaggcccagagtcctgtaaaactggccgctgcgccacaggaaaaactctatatgctccttaagcccggcgataaaaagcccgaaggcagagatagcgggaggcagtaagagataaaggagcagtggccttatcccgtagacaaagtctcctatccatttccacaccctttgctgccaggtcaaagttttgttatccatttccgtctcccctgtcactcaaacgatagtacgcctacaaatcccgtcacctcaaaaatttccttcatctgaggccggacattcttaagcaccatggttttccccgatgcgtttatctttttttgaatggaagcaaatacccgcagtccaacggagctcatataaatcgtatcctccatattgaccacaatctctttttcctctgtttccagcacggatttaagggccttttccaattcaggagcctgagccacgctgattttaactgctgtcttaacctctgtcatataacttacctcgattctgccgcagaagggcatataattatgggcgtatgcatatcttcagccggagaatattgcacccgtccctgtactggtactcaacgctgtccgcaaactgcctcaccatatagattcccaatccccccacagggcgttcctccaggggaagctgtaaatccggcgcctcccggtcaagaggattaaaagaaatacctttgtcctccacctctaacaccagctccccaccctccagtccgcagtatacccgcaccggtccgggctctcccccataggcgtagctggcaatattagtgaacagctcttccagggcgatttccagatgaagcgctgttttctttggacagtttacttcttccagatactcacggagcgcctccagcaccccatccatatattccattccggccggcacctgcttctccagcatttatctctcattcccttctttccggcataatgccctgacacacagcatggtaatatcatccgtctgcacagcccctttttcaaccgagaaatccttcactgccatggatatgcggctgataatcccttttgggtcctcctccggagcgcagcggtccagcaccgccttcaggcgctgttccccaaacatttcttcttcgggattttcagcttccgtaaccccgtctgtataaagaaaaatggttccctgttttcccagctccagtttttgttccctgtacttcatatcctcccacaggcccagtacaaagtccgaatggcaggccgcctggtgaaacggtccctgctccgaagatacatatggatggttatgtccggcatttacaaaggtgagaataccttgctccgtgtccagcattccaatgaaagcagtgacaaacatttcctccgggttatcttcacagagccggttgtttacccggaatgccagctcctccaaaggcatatccagcatagcgtagtttttaatatgtgttttagccatggtcataaatagggctgcagggactcctttgcccgacacgtccgctatgacaatacaggctttcccgggagcagccgggaatatgtcataaaagtcaccgcccacctccttggcgggttccattaaagcccaggcccgaagacccagctgttcttccagccccccaaagtctctgcgaagaaatccagtctgtatcctggcggcaatatccagctcagagtggaggcgagcctgctcccggacaagactggtggtctttttgtagaccacattcagcagttctccatacagcctgcggttacttccggccgcctcctcaaactggactctggaaaggcgggccgcccggacccgggtgattgcccgcaccgtggcgcctctgggctcgtcccgtattaaggccatttcccctacaatactccccggccccataagagtgttaatctcctctccatggcaatctaacacctgggcgctgccctccataaggatgtacattccatcctcccccgcctgcccccaggtcactatatcccggcccggggggaagtcaagctcctccatggcggagagcaggaggcagcttccctccggcaggtttcccttctcatctgcgggaaacagttccctcacttccttcagggccagcaatctgtctatatccatcttctgcactcccttcagcaatactagcccgagggccggagataataccgcccgtaaccttgtcctgcctcatatatcacgctgcagtctcccacagatgtaattgcggctctggatatgttccagctattgtccccctgccagctgctgtatacagcttcctccaactggtcgggggtggagctgacagtggtcagcatggccttaaagacttcataatccagcgcctctccaagggactgtgtctcgctgtttctgtccagtagaataaagatatccagtctgtagcctccggttgtactatccttataaaggcccatgtaccttgcgtcatccttggcagacttgacagctgacttatactcaattgccgtactgtcaatcagcagcttccttttcccgccggaatccgcacttatcttccctgcggctccattgagggcggcttgtgcgccgccccatccgtctcccaggctgatgctgttctggaatccggccggcagagggaattcctgccccagaagctccctctttgcctcataccaagccccgtctgcgtctaccctgaaaccatccggggttatctcgttcatggcgcagtgaccgtcctcatagaggtagtaatgttttccccccacctcaatccatccggtgcacatggttcctccttcatcataataataccagcgtccatcctgctcctgccgccaatccccggaagttcccggcgcagccatggaagtgactgcggcggcggccgtcagcagcactgtaaggcagaaacctgccgtcaactttcctgctttcatcctattacctcctctgatggttattgcccactccagttcctacttggccggctttttattatcctgacggtggctgcctatgccgctctccttctggaaggaccggctgctttctttgtggaaggggcttaaatcatgcctttcccaggagctctggggttttgcagctgccccggctgccttggcttccttctctgaaagttcaagctccacgaaagtcacttccgttttgcctttggccccgccggatttctccggcccggccttctctgcctcagccttctccggcccgctcttctctgcctcagtcttctccgccccggccttctccagcccgctattttccttctcagtcttctctgccccagccttctccggcccgctattttccttctccgccttctccgcctcagccttctccggcccgttcttctctgccccggccttctccgcctcagccttctctgccccggccttctccgcctcagccttcatattcttcaccggctctttttttacaagctctttcaggtcatccatcagaagctggcgcatttcccactgggcgctgaagctctccgcatactccacgcctttaactgccgccttggcacaggcaggatctgtctttaacgcctcctcataagcaatactgattccgattcccttggcattgctgcctgccagtgaaacggttcctgccttggctcccgctatggcttccatggcggtgcgtccttctgccaatgtctgcttggccttgtcactcaggccgctggtatcaatgggtatactatccatataacggagcgtcatagcggcctgctccttagcccagtacggctttgtctcatcaatggtagacagatcctgagccctgaaattcttaaccatttccctccggtccaaatactgtatctccgggccgtattttgcgtccagctcgccaatccgcgccagagcctcctcttttgtggcaggaggaatataatccgggtgcagcagttccgcctgattgaactttttaatctgaggcgtgcggtcttccccgttcatctccttaagctggttcagccttgcctcctccatggcccgctcctgcagcagttcctggggaactggtgtgagcccttcctccagaacctgaagcctcttttccttttcctgaatctgttccggagacatttcaccgcagggatggctgttcagcgtatcttcacattgttccagatgtgcctgagcccccttcttaaactcctccagggtgtccccaatcactttctccctttcctcaggtgttttcgcatctaaaagcctgttcactgcctccagcctgtattcattcttcttctgcccctgatccagagaggcgttaagcctgtcccttcgggcttccagcttctcctggcttaaatccctggcagtacgtatttcatcaagtttgtaataccccggcaaaaagtcattgtcgtaagaatttccaagtttttccttctgctccggcccataatccggtataatgggatccatgacttcccgtatatctacctccagcaaattgccgttatccataacagccttcgtggtgtccagcttgctttttgccttgttaaatctttcccgggctccctcatatacctttcttcgctccagttcccggcttatattcccaatctcttcatagctggaaaaattctgtttttcaatgtccccaatcctgccttcgattccccgcagcttttcctcctgtctctgtatctggggcgttaccggtttgggggacatccccagattctccatgagatattgtttggactctctggcctccagtctggaagcaatgctgcttgtaatcagtccagtgcgttcctccttctgcctgtcttcccggtttttcctgtcaacattatctgcttttgtccgtatctttccgggcccccagtcgaacaggcgcctgaatccgctgtgctcactgcgcttttccatctggtcgtaggcgtgaagatccgcctccagcgtatgggtgacagcctgcatccttcccctggctcccagccctaaggtgacggcatccacacgctgtccgtccataatggcgcccatgacctccgcctttatcattttgttctgttcccactccgaaagattggcatatttattgccatagcgctctctggctgacagaccgtccacatggattaaatccagggcgtcaacccccatctcattcattgtggtagccggaagcccggagcggtaaagggttgccagggatgtgtcaaatgctgccgccgcattggttttcatctgattggtcagatttcccgctgccagctgcctggacaatccatatatattgccgttctccggccccagagagaaatttaaccggttctcccctgtatgtccgccctgcaaccggtccatggaatttctgtaaagatttacagcaagatccgccgccacatattcgccgtccccggccatcggcgccacgttcccccggtgcagccgctcattaaagccgttgttcctcaacatattgtccgtatatgaaattaagccgttcatcatagccgtgcgcctggcctcaaattccgcccgcttccttgaatccgaaccgtaccgctcctgcgcataaccgggattctccttcagctttacacttagtgcctgctcccggcgaaaggcgcctataaggctcataaaatctttttcactgccggtaagccctcccggctccctggggccggtgtccgtgcccttgaggcaggacagatccaggctggcgggattaaagctgtcatccctgtcatagatatcatccaggcattttttacgaagctgcggatctccgctggtgtagtctctaacgaagttgcgcacatattccttctgctctttctccgatttctccggagacaggttcatcatctccacgaaatcccggtgatccagtttttcctcacccttgtagtttttgaattcctccaccgcgtaatcatttattctggttcttagctcgcccatctgcgtcagggcctgaatcaattcaggtgaaaactgtacaatcttaaatccgttgtttgctgccatttctattcctctcctctcattctctcttgtgcatccttccacatcctgtctcccacagctcctgtctcggtaatggtcacatccggcaaggtttccatttcctccctggacgcggagctggtggggggaatggaattctcttttatatcctgctttattctttccatatcctgtggaagggcaggaagagtcaccccttcatccagactgggctcccgagcctcgttttccggcggagccttcctttcaacaggaatctgataaccggccgcctgttccttaaactcctttaaactgagtttataaacccgggccattgccatatccatgtaatagtaaactgcatctgtccgctgaaagcctatgcaggttatctcatcctccccggtctgccacgcctgatacagagtccattcagacaggtgatacccttttccggtggaaagctccgtactcatgctgtacctctccgtttcaaaataaagcatcccgttatagaagctggtaaacaaaagattctttgaatcaccattctttatcaccagtatgttatccctgccgtaccggtcaggattggtataggcattctctttatctattttgtaagtgctgttcttgttaaatcccttctcttccctgtattctttccgcttctccacctcgctcagcagttcctgatcggcagatgtctgtccataaccggaagcatttaaatcatccgtttttatggttatgtatttaccatcccctgcatatatgcttataatctccttctccagattatgggccataggatagctgtctcccgcccggccgccaaggatgcaaaagctcagatttccctcatattgctcccccatctgcatctcccactgggtaactgcgggaaaaaatactgcctcatttgcggtctggtctttgaaataatcaatgcacaggagaatggggcctatattgatacccatggaataatttccgctcctccatacaggtccggctgtcactcctattccggctttattatccaggacatagaactgctctacagccgccccctccgcaaagagggcctttctgcggataaccgcctggatttcatcctcaatttctatctcctcgctctcacctttactgttggtctttgtaatcgtatacgttcttgtctctgtctttaaaatatccgatctctggcccactttgcccaccagagggcagtacccctccccggggcttaagaaaaagaatttcacaaggttctgccctgtcttcagttcccacacatccgtgaagatggattcctcatccggtatagcaaaaagttcggcatatccctcattttccttgctgtctgcagtagaaatccctttctttccttccacaaaattcctgaatttctgatttttccactccatcagccggtacagaaaggcgggcgcccagtcatagcctgtggacacataatagggaccccatttcaccggatatttcttcagggcgtccttccagtcctcctcaggatcccgttcgctgttccctgagtctgctatggccttccactccagaacccgttgattccagtttaaatccgcctggagaagatattctgtattgggaaaggtacctgctccaataggagagtatgcatactgcagtatatactcctcttcacctatctcctcctccctggtgtaatcacctttataaagagtaatgggaacataaaaacaatagcgcccgtttgtggtgacatttgtaatatccttgctgaaataagacggattcgttccccccacgccaaagattgaatctatgagataaagaaaatcctccccctcatcctccgaggtccgggaaaaaacaacctttccctccccgtcaagaatgaataaatttccgccatcatacaggctgattctgagccgtcccagtttatccgcggcgagatggccgtagaagctgtattgtgagtctgtatccgtccccgctgctccgggatctaccttgttctcatagagggacttgtatctttctgtttcatattcgtatgaggccagcgcatgtacctcctgccctgtgtttatctcttttgtgacataataataataaaatctcccctccagcagtcccaggacctgaaacacttttatatcggtatggctcagtgaatggttttctgggaaaaaaaatgctcttggacccgtaagctcctgaaaccgctgctccagatacacagacgcctgctcccccacttccttttccacatccggcaggctggccggcgtgccggttgtctccaccggcctctggggagggctggcgctctcaggcaccagcgtttccatgtagagattcactgattggtttttacaccctgtgaaaaaaagactaaggccggtaaggatggccaggcaattccttaattttcttttcataaagcgcacctcctcccaactgcttcccttatgtgtcctgtcccgcatgggcggtactgcgccttataaggcgcagcaccgttttcccgttatctgcggactatggagttacattactcatggcgctgttcatccagttagacatagcatccataccaatcttcaataccacaatgagtacaaatatcagcacaaaccctataattgcgtttttcaggctgttcttggccttttccctgtcctggggctcctcggcctttgccagctttgctccaagaaaaatgcaataaatcgctcccagcgcccctacgattccaagggcgggagtaagagccatgttaagcagttcgaccacgggtttggatacctgctcaaaagggtttcctcctgttgaatttaataacattaccggtacattcatatcatatcctcctgcatatttttttcattccatccattaaaatggatctattataaaaacctggggtgcctgcgctgatagaaaaaccatccggctgcagctcccacccctaaaatggttattataattgtctttggcgagggcggccggagccgctctgcaattcttatctggtaataccgttcatttcccgccctgtcccagagacggaactggtaaagtccggccagctccagccgttttatggggatgggcgccatccttccgttataatacatttccagagatgtcatgtcctctgtaagctccaggaagaccgtatccttcatctcctttttgtccggaacaggagaaattgtaaaaaggggcgcctgggtatcccgtttaaaggaaatgtcatagaagagccctccgttttcctgggcgaatctcaccttatagcgcccatccccatgcagaaaatgccatcggggattatcgggtaaaataccccttccgtccagttccatcttctctatggcaaagccctccgggaccttcagcagattcagcaaagacacctcccggggcaggatggtaaaccggaagtttacctccaaaagtctgcttcctccctctgaagaagtgggtagaatcaccatccggatgtggtacttcccaggctggctgtagataccatccctggaagtttcgatgccggagccattacgcaggacagtgaggatggcattctccacaggcttaaatgtcaccggatccgttacagtcattccctggggcacactggcggaaaaccggctgccatcgggcaacgtataatccaggagcccttctgtctttgacacaaggaagttcatgggcggatccactaccttctccatccctgctgcttcctcaggcagtaaggtagggacttccattcccagagcctccagcagccgttccagttcctgactgccttctccgtagggactttccggttctccttccacctggtaggaaaacatgctctcctgcgcctctttgtccagttctctagcctcaccgccggcgccgtatccctggtctgtctgaccggcaaaagatctgtccgccgagccccacagcgtcaggccggcggccagcagagccatggcggccaaaaggagcggacttctgattcgtttcatcctatcacccccctttggggccaatggacgggctgggggaaggctttgacacctcccttttcctcccgggagacatatcccggcttcccgcttcccttctgcgggaagcagaagcctcctccctctccagctgttcaaaggtaacaggttttctgtgctgtccctccgccatggcgcccctttttatttcacctgtatcatgaagccttcctgctgcaaaatcctccttctgctgccgcagctcctccaattcaatctcccatttgaccctgttcttggggctgtcaaaatatgccattttttcctccattactccgtcagcttatcagtaatgccctggttcgcaagtcccagaagccggtactgcagctcacccgtataaaaggtataggtttccggccaaaggccaggcagttcctgaatctggatgccttctgccgccataaactccctggcttccgtctcgccgcacacataagctgtgatgtcccccttcgcaagcccgctgacggcatcccctgtctccacctccttaagctcaattccgcttaaggtattaagctgccgcagcaccgcaggccccgtgtttacggaataacccacaatgccgtctgccagcgctccccaggagtccagaaccgtgccgtctgccactgccagataagaggcccttcttccataagccagggaatatccttcgtcctgacgtccgggaagcacagggactcccaccgccacgtgggcccttccctgtttcactgccgggacaagatcctgctcttttacccgctcaatccggagggtgacacctatatctgaggccatttcctccagaacctgctgctccagctccctggcatacgcctgatcccaggcagaccgctccccttcctcaggcacggctgccacaaggcttccctgggctttaatctcatccaccctgtctttatccccgcagccggaaaggcccgggagtatccacaggagaaccgcggcaacggttattttcctcactatgcccttcataaaagctgcaatcctttcctcatagctgtaatcttcccgcctatatgccaaacagccgctcaatatccttaggtgtttcaatatcaatgctgctgcgttccgacggagaggtaaccacgaatgcccggccccggccgttgttgatgatttcatcctgctcgctttcattgatggctcccgccttctcataaagcctgcacaggtcatgcatatcgttaggcgacaggggaaaaataaaggaatactggcaggcgttgatgacagccgtagattttctcgccagttcttctgttcccacaaagtccttaatgttctgggtaatgataatctgcattccgttatactttcggatacgcttggccatctggtacatgaaatccagggccacgggatacttgctgtcgataaatacatgggcctcgtcgataacgattataatttttctggaggcgccgtatcttaagttgtaatctctgttcttgataatttcattatccagccactttaaaacaagaagcatctgggcattggctacggtattattcttgttggccagcagggactggaagttaaacacaataaaattttcctgggtgcttatggaggcttcaccgttccacagtcccgcgtttcttcctccggtggcaaatttggatatgtagttcagcaacaccgtcagattcttcttgctgtaatccccggtggacatctgaaaatcattgagtatcttctcatacagatcgtcaaaggtggggtagtccccgggtgtcagcccgcttaaatcagtctctgcgtcaattccctttgcctcgtacatccggatggtaatattattcaggtactccagcgcgtccgcttcaattcccggcagtatctgccggtaaaactcttccaggaactgcatgtgcatattaaagcttactttggcacccggaatctggttctcttcctcatccccgtcaagttcatcttcctcatccgagagtccggtgatgatgtggaagggattcagtcttccctcggtggcgcttcccacgtctataatctttcccttaagggaacgggccagccccagatactcgttctccggatccagtatgaatattttactgttctccgcggccaggttggccagaatactcttggttgcataggatttaccagaaccggactttccaatcaccaccatattgctgttgacccgctccttgttcctggcaaaaaagtccaggaatacaggacgccctgcgctctttcccaggcagatccctttcttttccatcattaccttatacacgtatgggaatgccgcggccacagagccgctgtggattccccgcccgtccttggaaaatgcgtcgaaggcggatatatggccggaagcgtaggcatcaaactgccgcatgaacatatctgaggatttgaacccccattccgacagttccctgcggatctgacgcttcatgccgattccctggcccgggggcctgtatcccggtcccagcagctccggagacgcctcatagtcataggctgtgatgaaaatattcacgtccattagtatctcgttatccccctgcaaaagcgaaagcacctcagcaagggtatctatatggctgcccagctccatcagacggctggtttttccggtgctggctccctgctcccgcagttcatcaatcgccctgtcaatctgtttaattcccttatatctgtcaatgggcctcatcttcagcgttacacgcacatcaggccggttaaaaagggcgtggccccatgcattgggtaccacaatgggataatcggttacccgcagattatgggttacaaggccgtcataggcaaccgtcctggatgtaaccgccagcttatccggaagaatccagtccatgtactggtccggtgtcagcttccacgcctcccgctcgtcaaagactccgctgtagttgtatttcaggaatatagccagctcctgctctttgagaattctgcattctataccatggggacctaaggtatccaccatgttctgtgcctgctctgtgagacgccccctgtcccgcccgaaaaacaccatataatgaaagggcagatataccgtctctttattattaaacagctccagctggctcatccggtcctgtataatcccgatacgcaccgtcagctcctcatctgtcatcagtccgcggatataggctgcttttaaatcctccatctttttttcttcgccttcgataaagctgtcatagagcaccgggcggtccagctttaccatagcggcggaatctgtgtcattgactgtccgaaggatagaaccatacacctggtcaataagctggttctggcgcggctccgtaaggaatctgaactcaatggagggaatctccaccactacccccaggtaagaggttccatattcaataaacatatctgagatgcctgtaaacggggtcaccccggctacaggtatctgcccctttttctccggatgctttacaaactctttatagctcatggcatatctgattgcataatacaggctcttatatgccttctcgtcatccagagggataatggaggctgaaaagacaataaatacaatcagggcggccatccatcgcaaaggcaggttggacagaagcataaaaagggtcagggtcacccctgctgccgcaatcacaatgtccagcagttcaattcccttaaaaaattccatggaaaccctggttttttttggtattattctcattttttatcccctttgcttttatctggattgagccttgtaccattgggcagtttgggcttctctggatagaaggcgatttgtcccttattaattccgctgcttataggagttttgtcaatcttacaaccaaaggtgcgctccagacgcattctatcggcagggttaaaatacattaaactgtttttatcatcagactggtgctgaagccaatttgtaacgtaccgggaccgctccttgggatcggaataagacaaagcctcctccctgaccttggcgatttcatttctttgcgcaagtacggcgctcttccttttagcagggtacataaagtctacggtgccgtccttatttcttataaacgcattatcctttctaaattggtcgtaaccgtatttaaaaggcctcttatcattttcaaagtttatatgctttaaggtactcttctttacattcttaagggctgcctttgaaacaggctccagctgccttgaccttcctctggcaggacggtgcccgcctatggtaaagccggaactgtttttcagctcgtcataaataacggccttcttaaactttggctgcttaggcggcttagatcgcaggcggctggtccttacctcactccgggccccggaccccttaggatctccgccctgaagccgggttcccacatccttacctgcgccggtaatcttctcctccagctttccggataccttctgctccagccggttcttaattgccctgaatggggcagcggcaagcatggccgctccataggcatcccggttgctctcctgctccagccgtcctgcggcttcattcaccagaccggtcagcaggctgcctgctttgtacacggtccaggccccgcccataacatagagggctgccatgacaatcctgctctctccccccatgccctcagctgttattcctcccctgagaatcaggggcatcagcatcagataaatcttcatcagaacaacggtaccgtagcctgtaaaaagctttcccataaacatcccgaaccactgtttaaatttctccccgtcatccaggggcatcattgccacaaagtaaggagacaccaggtacagcagaaggatttcaaatatcctccgtatgactgtcaggaaacagaggaagaggataacgcacaggaaaatagcggtccatcctcccatcagataatcgaatctgcttaaatcaaaattgagaaccacattgggtatgttggtatatctttcataagtgtcattcaaataaaagttctttctcggctcctttgttatatcaaaatccgggttggctttgtccagcaccttaaagccaaagccctcatccagttccaccgttccccatttggacatattattctcgctgtcccaggccgcgtttacggatgcaatggtaaatatggtgctgcccagagtactcctccctccattgtcatcaaaggacactgcggtgttaagggttgtaagtataatcatggacagctgtatcatgaaccaaaccgcaaagggaatcaggaaagcgcccagaacagatttaaacagctgcttgagcacatggcttaccggccgtttattttcaaaatccaagtcaaaggacgactttgccaccccgaatatagtcagaagcagggcaatacccacgcctcccagggtgataaccttgaaggcctcagagatggcggtgctggtgaacagcacctctaaaaggctccctgtcacggcagctccctctctgccattgggatagtaggtaaccggctccaggccaataaagatatcaaacgccttttccagacagtccaccaccatcagatatcctataaactgcaaatagttcataaaggcgcccagcacctctactacccgaatcacccagtagaacacaacctggagcacaggaaggagtatgggccccaggatgtactgaaacacatatccccaggcaatgtttataatcgaaaccacaaaatcaaacacaggtgtgacaatacttgagaggaccttttcatatacccactcataaatccccagatatgacatctccaccttatcagcacctccttatccgtctctgtccccggaatcctttgccgctcccgcggcgccagaggccgccccctggaccccctgctttgccgcccccacagcgtttttggccgtggatttggctgcggatttaaccgcgtttttagctgtgctgccagccgtcttggcagccgtccctactgccttggcccctgctgtggcggctgccttggctcctgccgctcccgctgtggccgcagcgccagcgcctccggtggccagaccggtgcccaggcctacacctgcagccacacccagctgaacgccagtcgatgccgccttccttgccgctcccaccgtatatcccatggccagcatggtggatgtcttggcatcctctgccgctttagggttgaggatctccaggaacatggcgcagcttttatatacagcaaacatacctcccaggaaaaatatggttttaagtatggaatcaatcatggattcctccagagaaggtgaattcctgtccacaaggcccatgttcaccagtacgctgtccatggccgagtggttctccatatagctcatgcctgttttttcccaggcgaaatccacagcctcttccatgcggtttacctcctcctgatacgcagggttacctgagcccggaagttcaattcctccggtctgctccctcagattatcaaaaaacttatctttggtctggtcatagacacctcccgcatacagccggtccattacaaaggagctgccaaggctcaggttatcactgaaaatcaaaggcagcagcagcatgaatattttcagggcatagataactccaaatcccgccaaaaacttggctataaacatttccctccagcgcttaaacatatccccacggtccagagggattgtcgccacaaaaaatggggctacaaggtacagcagcaccagttccagcagcctgcgtataaactgtataagcacgcctgccagcatgataatcataaagatgcttgcgctgaagcccagaagataatcaattttggccgcggagaaatcagagcccgaatccctgaaatccaggtaatccttatcaccgttcagataactgcggcgcaggtcgtcgctcatactgggcggcaggtattcaacacggaaggccgaatcaagactggtcagtatctcataggtaaacttatcgcccagcccttccgcaacatctgccgtctcctgtaagacaggaatctcaaaatccgcccttccggctcttaagctggctgtcaggaagatgtaaaggcccatgctcggatcccctgcggtgccggactcggcctgtatgaccgctttggtctgctttatcagagccgagctcagctgcatcagggcaatgcacaaaaagggtaccagcataaaggagacacaggctttcatggcatccttcagcacctggctgatgggattcttgttttccagcgtggaggaggacatggagcgcactatggcaaaaatggtaaataaaaagcatatgcctacggccaccagagttatcatcagaaagcctttgctgaccgcgtcctggttgaacaccatctccataaaggtcattggcttgttatccacaataacattctcagtgcctgcgaaaatacctatcattgtttccagggagtccagaatcttgcacactgtaatcaaaaagaagtatgccaggatggagacgctgtgggacagtacatacattgctttttcatagaacaaggacaggatttccgtcataaccggcacaaatatttcgttaaataaaagcaccattgtggtataaagcacatcagtaaagccctttgccacttccattccatcaactccttaccgaaccgtcagattcctttttttccgaaccagcatcactgctcctgccgttatggatatgactatcgccgctatggcaatgaccccatacatatttaccttataccgcagtgagaattccttaagggtctggttgccggccctgtctgttactgtcagtacatagctgcctgtttcggttatcgtaaatccgttaaattcccgcggttccccgccgttctttgccagggtcacagaggccagatccgtggaactgtagattatccgggccgtctgcccctctatctccacttccactgccggaggctccgtgtcccggttaagctctacctccagagtctccccgtaatctcctttcagggtaacaaggtagcttccgtcggcctccatggtgagcagagttccctctcctgtgtccagggaattcccgttaaaggaagctgctgaaatcctggtcccttcaggcgcgctaaaggtatcccggttaacatatgtattgctgatttcaaaggtaaactcatattctccggataccagacggtatattccgtattccgccgcctcctgccgctcgttcagggctgtttcctcctcccctctgtagagagtgtactgcccttcacccggatagattgccacggactggttaatgagcattccttccggcacgctggaccggaacgtaaagccattctccagggttaccaggtacatcttttcatcctccagataaacctggcttctcccagagacttctctgccttccctgccggaaccgcttccttggtctgaaccattctgaccggaatccccctcctggcccgcaccgtcctgaccggaatccttctcctggcccgcaccttcctggccggaatcctctccctggcccaggatgccttccgaagatgcgtgaagcccctggtccgtgttccctgcctcattatctgtcccgtcattgcttccttcccctgcctctcctttatccccggattcggaaaagagctggccggccaaggctgccgcaatgtcatcaccggcaatccctgactccgaagtaatctggttcagcagtcctgcggtatcacttccggtgagtccgtctatctgccgggccagggcgcctgcggctcctgatacggcgcctgacgcgtcctgccgtttctcatcaatgcggaaccggaatacggttctgtactcttcctgctgggagaggggaacattcttatcatatactgctgttaagcgcataacataggtccctctgtccgacaacagctggccggatgtatagttcatgggcacgccgtccttctcagctgtacagaacacgtccacaggtatctccacatatacggggcgatccgttattcctccgttggatacattggaataaataaaatatctgccgtctatggaatgttcatataaatcatagtcactgtgatacttctctcccatggacacctcatgtatccttggacccgccaaagcgctgtcctcctccagagcggtctgcgccgcccccggtccgttgaatacgtcctctgcccctccctctgatatccagtcctctgcctcagtataaatcctggacagataggagtctgccgtgtcatcgttataggaagctgccagcgccctgtccggcagcccagccgccatacagcagcctgcaaaaagcagcagtcccttttttatttctctgttcattccgcagacacctccctctctttttcctgccggctggcaatgatataattgcgctcatccaaatcatagtaaacctcgtccccgaaaaaggcattcatccgtacctggcttaaatccatggtcttcatctcatagagaggacacttgtagctgggcgtaaactgggtctttaagggataatttccaaaggttacgataatggcgttgccggtgctgttcttattgttcagcttctgcagctccgaagggtatataaggggcctggtctgcacctggctggatacattgatgttccctgtcttgtcccccagagtagaggatacgctctgtgtggaaacagtcttgttgccgcagagctttgagaattcctcacaagtttctatatcattggaaccaataaacattttcaggccgcagttgctcttgatgatattgcttatggtctgcccatatacattgtctaactgggcataggactggactaccatgttgaaccagattttacggctccggccaacagttatcattttgtcgaacttgtctatcttaggcatgttgccgaactcatccaggatgaagtatacatttctcggaaggcttaaatcctccctggcggaggccaccttaatcagcgccttgtaaatgcacagtacgaatacggccgccagggcatggcgggtatccttttcatccggtatcttaaggaacagcgccgtaggctcggctgcaaactgctggggatcgatatccgtctccgaggtaagggagcagagtccctcgtcgttaaacatagagagcttatcaaacgcaatggacatatagctggccagggtggtatcggccgctgacagaacctgccttgaaagtccaactgacttggacagcttggggcgtcccataaaatattcttttaaagccctgaactcgtcctccgaattgctgatagccttgtttacattatagaagcagaacttctccctggtcatctccagctccggatactcgctgtcctccagcatggccaggcataccgccatgataatagaacgggctcctttttcccacacaggatcgtcctgggattcaatgggacagatcacgctgataaggtcatttaagtcttcgtaaatctcatcatatatcttctgcttttccaccttgataacagtcagcagctccctgcgcacagcgtaggcttttcccttatactcataccacacatccttatactggtccgcctcattcaccagctccaaaccgctttgcctcacgtccgtgtcgcactggaagattccctgtcccgccttaaggtaaagctggtacctgtcatagatatctcccaaagggttccagcggaaggagctgtaaggatcccttaagtccagaaccattaccttatagccctgttccgccagcatgccgctgtgaagctggaacagctctcccttgggatccgtacagatcatggaagaaccggctgaggatttccccagtatctgaatcatggggttgataaaggatgtggttttaccgctgcctgtggcgccgattacaaggccatgcatgggcttggcaatgttgatgttgagctccttctttttcttgttgtacaccgcgtatacaggaatcccgtcctttttttcctctttaagtctggtaaaactcttcggggagaaattatcatccttctccttgtcggtcataaagcgtgaattctccagggaactttcaatactgtcctccttggccttcatcagacgtttggcccgttttacagttcccacgtggaataccaggtacagcatataaaccattaccgtgaccaccgctccatatatccagacagccggcttaagcagaaggcccggattccagagtcttccccaatcccgggttaaaatggccggaaccagctccgtcagcatcatggcggtaaggtaccccaacaccatcaccaccacaatacctcctaatatgtatcctgctatcttctttatcatagggccctcccgcattcgtatatgctccatatgccttctgtccataaaacctcggacaatcactgcttttttattgctttcatactacaatagcatttatcctgaaacaatagcctgcgaccgaaagtcagtttttccgaccgaaactcaatcccccttccgatttacccttacaagtgcttccccgcccattagaacatatgcccgccgggtacacaaaaacaggcggcacagccgtgaagccgcgccgcccttatccctcatcctttagcggcaggataatggaaaccttgaataccttctcctccggcacaaaggtgccaatccccccgtgacgttttacgatggcctttaccgactccaccccaatccccacgctctcccgcttggaagaccggaaatatcccctttcatactgcacatcccccataaagctgttgtccagcacaatggacaggcggctgtcgtcctgaaggcaccttaagaatatgaacttcctgcccgactcctgccgtttgcaggcttctaccgcattttccagcagatttcccatgaccacacataactcatcatcaggaagaacggtccggcccggaaccataacccggatatctgtttcaatcttctccttctctgccagggcagtgtaatggcacagtactgcgtccagcgcatagttgctggtaaatgtaacaggccccatcgaatccatggcaggtgaaagctgtcccagatacgcctttacatgctccaaatttccttccgccgcataggcctgcagcagtcttatatgatggcgcatatcatggcggatccgtctggtttcctcaattctggcattgagctggcggtaatgatctctctgcagagccagctgccggttcatccgtcctgtctctgtgacaaaaaagcttctggcccggaacgcgtccgccatatcctgccacagaatactcaacattcccaccataatgaccacgcagccaatggtcaggaagcttccgcctattataggctcgtacagcggcagaagctgttccataaacagagcggaaacaagtacaaccgcaattaccagcagggtctgggaacgctccattccctctgccatcgccatatatgccaccagtataaggtgacaggcaatggcaaatttataccactgggtaatatagctgaacagatccgccgcggccgccgtcccatactgggcataacagccgtataccagggccagaatacagaatattcccatggcggcggacacctttccccctttgatgcggtacaggtcattttccaatatgaccatcagccaaagcatggcgtaaaagcagaacacctggatcccataccagggctgcagccccagctgaatcctttcccgagccagaggccacagctgataccctacgaagcacaggcagaacaggcagaagagaaagcctctccaccagcggattttcacagccagatgcagggagagaccggcggcggacacagccagccccagaaccatcaccttcagcaacagccccacatcccgtattccggttacggcatcgtagactccaagaagcggcggactgaagttctgggaatgaaaggcgcccagagccgcggcctgtatgataagctctgtgtcccggccctgggtgagaggaaagacaaaccgcttcataccggagcggacatcctctatgcttccccattcccggaccagctctcccccgatatagaccctgcttgccccttctatctcaggcagttccagggcaaagggaccgcccttttccggcagctccaaaaccaggcggtatgtaccctttgttcccctttgattccgcctcatctgtccatattttcctactgccgcagttacaccggcaggtttctccgctccgtcaaacgcgtccggtcccagaagcagatcgggatagaactcccatcccgtaacaagataccggtatggattctcctccatatcccccagcgtcagctccagtcttcccaattccggctgctttccccccaccgtgtatttattatctgcatagtaaagaataagtatgaataaaacagagagaatggctgaggcagtaataacaataataggccgtaaacttaccaatttctgatttttcatcttacctccgcagatccttcagggcatattccatatattcctttttcacctgggccctgcctctgacccgtacaggcagggtttccccatttttcagacgaataacagagtctcccacctcctgaatccagtccatattcacgtaaatcccccggttgcagcaaaggaacctggaatccggcatcagccgcccggacacagccataaaggactccgcagcctccagtacggtatcgctggtatgtatccgcaccatacgtttaaggctgtccacgtacaacagtttactaaagggcaccacagcctccactccgcccttcaccatcaccgtaagtccccgtcccgcctccagaagctctctggtaaagcagtccagggccagggccagatcctcatagctcaggggcttcatcagatagtaggcggcccttacccggtagctgtccaccgcgtaatccgcgctggagctaaagaacaccagacggcagtccttatctcgctcatataccagagaggctgtctccataccggtaatccctcccatatatatatcaaagaatataatgtcataatgccccggctcataagcctctaaaaatgcttctccggattcaaactcttgaatctcaggtactgtctgatgcccggaaaaatattggtcaagcatacccttaagcagttctctgtcctgcatggtatcatccactactgctataatcattggtttttcctcttcttttgtattaaaaacagcggtctgttttccctgaaaacggcacattccatatgcggacggttcatcctgaaagcaaaaacgccggcttccttctttagctgaaggaaaccggtgctctttgcattaaaccatctgtattttattttaccacgctaatccgggatttttaccacgtttaacaaaatttaaagttcaccgtctttcactgcgtccggcaggaatattcgggcggaaaaactatccgtataccatgttgtctcaaatgtccccctatactcccggaccacctggctcataagctccataccatacccatgggcccggctgtcctccttactggtacttctgccttcctcacggggcaggctgctgttggtgcacaagatagtaaggccggttccaacccgcccaatctccagggaaatccatttctccccatcctccggaagccggctgcaggcttctatggcgttatccagaagattcatcaaaagcgcagtgagatgggcgtcatggaccgccaggcttccgggcagcctgtccccctctgcttccacgtatatcccctggctccttgccgttccaagctccaccgccaggatggagtccataaggatatggcctgtatattccccattctccatgtccaccgtggaagaaacaagccctttcagatattccttcagtttatcggtctcccctgtatccagataatgtttaatcagggtaagccggttgcgggtttcatgaagctgctttctggttcccctgatatactcctgctgaagggcaccatatctggctctggcttccagctggacctgggacagctgctgctccatcttaagcctgaggctttccttataggtccgatccacatcatatatcataatcccgcctgttatgaggataatgactccgccagccagctctgcgaaccaccctgtcagcaccggttcatggagtgggaacatcttccctgccacaagggcacacataaagacactgtttccggccagcacggcaagacagcagggacgcttcttacagacagcccagccggaagtggccagcagccaaaaagcagtgaaccacttatacaatccaagtatattgccatatgtgtacaaggctcccgctgtctcagccggaatcagaggctggataaggacgctcagacaaattaaaaaacctgccgcgcaggcgggaacatatactctcccaggcaggccgcagatctgccactggatccacatcatagaaaaaaacatcccataataacagaagcgctccgccagcaggacccagtacatactctccgacattacctggaacaggggccaggccgtgctgccgcagaaacagaagcagagaaacgccatcgccccatatggcctggaaaaccgtctgacagcccccaggcacaggcacatggctccaatgagaaaagccgccataattgcagcgccatggattaaaagccgcagttcagaggttctggacaccagctgcggcacgccaaaagccggcggatataccatgccgctgtaaaaatggctgtcatcctccgcctcaactacaatctcaattctgtccttagctgtgaatgttaccatgctcaccgggggacggggccccatgtccccgtttatgttcccgtccatgcccacgctctgcttcagcttaccgttcacccaaagtctccagcgagagtagaccggtgtcagctccagtccgtattcctgctcatgcccctctgtgaggatcactgtcctataggttcctttcccgtggggagaagcctcccgatcccccaggtcaaagcctccatacctgcctatgtaaaaatatgcgtccggagtatggttttcaatttcatccggggacagcaacttgtcctggtagaaggaccagccgtctgtaagatagaacatagggtgcctgctgtaccactgatcctccagccatataacaccatccctggaatatgggcggggacgggtatatttattatccttttcatagcagtaatagaaaaaagcgaagctcagaaggattacagctgttatcagcaggaacgcctgcttctctctgactttcatcatggcttcctcctgctccttcttttgtaccaggataacaccgctatacccgctgccgctcccaggacagtacggaagatgaatcctgaaggattatccctttgaaggcggccggaatccgcatccataccctctccggcaggttcctcccggttttcagtggcattttcttccaacagattccctgtcctcaaaccatcttcgtgaaaggagtcttctgcttccccgccaccgtatgcccggccgtcttctccaagcgctgaaccggaggcccccggcctatcccctgcgcctgcgccagacgcgtcccgcgcggccatgccgtcctctatggaaggttcctgtctgccgattttgtccgcagctaaaggcccgtttgggtctgagccagccgccgcggagggctcctgtgtatcggcggcagccgtcgtggagagtctctgtgtaccgatcctgtccgcagtacagggctctggtatcccggcacacttcacagcagatggctccagggacagagtgccgtccccatctgacgtgccggatgttccgtctgcttctgcggttcccttgccgtcactgtcaggatcccctgaaccgccaaattcatcccccggaggaggcgcgctgttccagggcggaaggtctccctggtcatcccggtcatccccgtcacggtctccatggccaaaccggtctgagtcattctcataataaccaaaggatttcaccgatgacagcccttccatggaacctccggtgacagcaacacagaaccggtatgtatgattaaattcaagtccctccacagtgattgtcaagggatctatctgcacagagcatccgggcatagagtctgcgtcctgccatgtatcccctccatctgctgaacaaaacagctcaatcctctgtgcgtcctctacaggattcaaaaaatacagtacagccatatcctccatcctgaagatttcctcaatatggaccgttttagggtccacaacataaatctcaatctcaatttccggtatctctataaaaaaccagtcgggatacccctccgcttctaccatagccctgtaaacccctggctctgaaagttcctcaggcaggtctttccagttcagcgtaaaatcccgggtccacattttcctttcccctgtgggatcgcaaaatacatatgacgccgacggcgccagcttatcatacagcccctgacagtctgttcccgctaatacgctgaccccgttttcatccaggcggccatcaagataaatctcccttgtaatcacctcagactgttcgggcaagggagtcacctgcgatgtgtccacaatgagcactttatccgtgacaacggaactgccctccgcctccaccaggcaaagcttaagctctaccggcgtgtctgcctcaatgcccactgagttttccccttctgcctcaatatgggcatactgcaggctgcagtccccctttcccgtccactttaaggcaatgctgttgtccccggaaactccgatataagcgttatctgtctgaagcgcatatttaccgtttttcgtttctgaaatctccactgcaaccgctccgtcgccctctgcccataccccggcaccatttttaaaggtggtttttccggatatctgaaacagcgctttgtctcctgccgcgccctggaaacggatggggccgtccacaaacaaattccccttgtcagacacaacgatggaatatccattcatattcaccacggcttcatcttccggagcaatattcaaatcggctgaacctgcaacaagaatatcccctgtaaggcaaatctcctccccggtctccagaagggttaaaagttcctccacagtgccgcactggacctcctcatccagcggtatctcaatcatctgtaattgaatttccggctgacggatatctccgggattctctaactcctcctgattatggcctgtttgtccggaatccggatgttccggattctctccctctatatcttctctgtccggggatggcggggtttctccctttccgttttcttcgtccggggatggcggggtttctccctctccgttttcttcggccggaggcggcggggtttctccctctccgttttcttcgtccggggatggcggggtttcttcctctccatcttctccgtccagggatggcggggtttctccctctccgttttctccgtccggggatgacggggtttctccctctccatcttctccgtccggggatggcggggcttctccctctccgtcttctccgtccggggatggcggggcttctccctctccgttttctccatgcgaattttccggcgcttccccccggcttccttctccgtccggggataaagaggcatcctcttttccatcttctcctgtggataattcggacatatccccgtcactgaccataccataagctggaaaaattactgtttttccagccagaaagccagccagtaccactgtcaatacaattctataatacgttctcctcatctgtcccaccgtctaatcttcactctcatcctcaaacatcacaagcttatatcccagtgcacgtttacattctatatccgctatcaactctccgtctgcatcctgcagcttctttctcagattagatatatgaacccagactgtccgtatatcccggttgggcgccatatcccatatctccctgtaaagctccccggcctccatatatcttcccctgtttctcatcaacgcggccaggagacggtactcctttggctttaaaagcatatctctcccatccagataagcccgctggctcttcacattcaaatataacctgctgtcgccctggtggatatcttccccgcccctgcgctctaatcttcggagatgtgcctcaattctggctgccagctcctcaatatcataaggctttgtaatataatcatcacctccggcccggagcccctggacaatctgactgctctcccccaagcttgtgaggaacagaatcggcccctgaaactgctcacgcagccttctgcacagatctaccccggaaccgtccggcatcataacatccaaaaccagcaaatccggattatccctgagaacacacgactccgcctggcccagtgtggaaaccgccgtaacctgatagccgcgctgttccagctgctccctgttatattccaatatatccggttcatcctctcccagcagaatatgatatcccttcatcacaattcctcccagctttcttgcgtcatctcaaatccattcaggtccgggaatcttattgtatctctattcccccagccttggtcttttggataagacagtcggcagatgttttaactcaatcattcattataccgaaaaattttgttttacaagcaacattttaccacatatcctatcagattaacagaataagggactttttctaaatacgcagacatttccatctgccttattgtagtatacttttttgcaggagtgaaaaacaagacaaaaaaaatagctggtaaacattaaaagtttatcagccatgaaagaatgcttaactaaatatcactatcctaataatattgcctgcagacacaaggaatttttaacaagccactggccggactcgaaccggcgacccacgcattacgaatgcgttgcgctaccaactgcgctacagtggcatccgaacagcaattgccattcctttgatgcaacaaggctgctgcctaagcaacagccttgccatcatgacctgaccgggaatcgaacccgggtttacgccgtgagagggcgtcgtcttagccgcttgaccatcaggcctaaaggtaaatcgaggcgacgtgattcgaacacgcggcctctgcgtcccgaacgcagcgctctaccaaactgagccacgcctcgatacctttggtagtataatacatttattccagaaagtcaaccataaattgtcaaagtttttaaaataattatgataatttccgaaaagccccagttacaggttctgtactacacttccaccgcggtaaatccaaggtcgtctaaaatctccactgccttggcctcgcagtccttatccccgtcaatggtcactgtcttgacggacaaatccaccgtattcttaatgcctgctccgtccagtcccttcttaatccggttcacacaaccctcgcacatcatttcctcgcacttataagttttcatgttcattctccttttctgtttttatattaacaggctttccccgccctctggaggcagggacgccatcctgtccggctgtcatgaggctgtcatgactttctgaaacatcccgtcattcataaatgctgtcataatcatagtttgcatagaaatccgtgattctatcaaaatagcggtccacattgtcgtttgtaagcatatgctctcctgccgccatccattccagcagctggtcaccaatgtcctccgagtagtggattacatccatataatggtccagattgcaggtaatgtcaaactggtcgtcaaaggcaaagagacgtatgtttctgcactccagcagcatacgggccatgaggcggtatccctccatctgccgttcaaactccccttttaccatcagctcgctgtcccaccagctgatgctgtagggcggaataaagtagtaaaaggtgacctggggattggccctggccgtggccagcacattctgttccaggttctccatgaccgtacggcggtcttcttctgtaaaaggaacggtttcatttttttgcggctcccgttcatatgtctttaagacagccttcctgccccagtcccgctccggtgcccagtgcatgtattcgtcaaaggtggtggtctgcccgcctgcctttgtcctggcaaaaacaccctgaatagtgccgaagatcacttccttgttgaaaatataattcacatcattaaagggattgtcatccgtcagataatccggggaaggagccgccggattttgctggtccttctgataaaacaggaagctcctgtcaaggctcctgcacaccacctttacctgggggttataggacagggcccttctcacagcctggtccacctccttataatatcctcccgcatatggtatcttgacggatgacacgccgaaaagactgtcaaaacggctggctttaaaattctccatcatggatgtccctgttagcactgcgtcgtatgtaaaattgcggctgataccgtcattctggtaccgttcgctgtcaattgggtatgccagatgttcaaggggcttgtgatagtggaaaaaaggatccacccagaccaccagtccgccaagcataaccatcatggccagtacggctcccacggtaaaccacagccatctcccatacctcatgtcttctgtcccattttcctgcttttgtgtatccaatataatctctcctgtagctgtttattcaaataagcctaattagaactgaaaataaatgaagccggatattcctgccagggacaggacggaccagaccagaaggagggctgttcccgctccgcgaaggaaggtgggacgaagctctgtctcccccatattcctggcattcatcaccaggcaaagcacgattccatacagccccagcacggtaaatacccggtggcctgtcagccagagaggcagttccaccatcttgaagctgtccataaaggacggattaatctgcatgtttccaaaatccagcagccgtttcaaaaacagctttgcctgggatatgctctctgaccggaagataacccaggtcaggttgacaaagagaaaggtggccatccatctaaaagccgtgtgcagattctcccactgccgtttaaatacacggttaagggcctgggcagcgccgtgaagcgccccccacaggataaaggtccaggcagcgccgtgccagaaaccgcttaccagaaacactatcatgatattcatgtaggtgcgcaggcttcccttcctgcttccacccagaggaaaatagatatatgttctgaggaaacgggtcagtgtcatgtgccagcgcttccagaattccaccggagacagcgctttgtagggagaattaaaattaaggggcagttccaggttgaacatcctggaaattcccatggccatgtcacagtaaccgctgaaatcaaaatacagctggaaggtgtaagccagcatgaccagaaacgcgtctgtggagctgagtatctccacctgggcatacccccagtttaccggccccgcaaaaaactcagccaggatgaccttcttaaacagtcccacggccagtatcatcagtccctctgccatattgcgggaatctgccttcaggcgggatgggtccttaagctggggaatgaactctccgtgcaggagaatgggtcccatggctatcttgggaaaatatacggtaaacaggaaataatcccaaaaactgtaatctcctgtctccatgcggaaggagtcaaccagccacgcaatctgctggaaggtaaaaaagctgatccccaccggaaggagaagccttgtaaaggcaatgtcctttcccagaaacgcgttcaggttctctataaagaaattcgtgtatttaaagtaaaaaagcagggccagattggcgcatatgccaaataccagaaccatcctactgccgggcctgccgctctttttaccatccgtcctgccgggcgtcttaccatttcctttggctgtctccttatttccttctcctgccagcaccctggaaacagcccagttaaataccgcgcttcccaccagcagtcccagataccatggattcgcgtaggcgaaaaataccagggacatggcagccaaaaatcctctggcccatgtatggcgcttcatccggcaaagcccgaaatatcctgccagcacagccgggaggaataataataaaaataaatatgaattaaactgcatgtatcgtttcgtttcctttatctctggtttctataattgttttctatgtctggtttcctgttatttcatcatcttctgcagggtcctgcaaagctcctccaccgtggcgtcgctgtcgccccggcggatatcatccaccacgcagctcttgatgtggcgctccagaagcaccttgttaaagctgttaagggcggcctggaccgctgccacctgggtgatgatatccacgcagtagcgctcgtcctccaccatggacttgataccccttatctgcccctctatccggttcagccggttcatgagaccgcgttcttccgtcacttccctgtgtttatggcggcaggtgcagccttcttcctgattcatgtgatcctctccttttaccttactgttcctgggggaaaccgcccctgttccggacaggaacggtttccccgggtcttttaagacctgtgctacagcttcagattcctgagtcttaaggcatttcccaccacacacactgagcttaaagacatcgcaaatcctcccagcatagggcttaaaagcgggccgcccaacaggtacagcactccggctgccaccgggatgcccaatgagttatagaaaaacgcccagaacagattctgctttatattccggatggttgccttgctcaatttgacagccctgtagacatccatcaggtcagatttcatcagcaccacatcccctgactccagggcaatatcgctgccgtttccaaccgcacagcccacatccgcctgtaccagcgcaggtgcgtcgttgatgccgtcacctaccatcataactgtttttccctctttctgcaaccggtttaccacctgtgccttatcttccggaagcacctcagccaccacctggtccacatgggccagcttaccgatgtactgggccgttttctcattgtcacctgtgaccatgtagacggtcactcccagaccctttattttttccactgcctccacactggtttccttaattgtatcggccacacacacgattccggccagacgtccgtctatcacaacatacatgggagtctttcctgtattggcgtactctgaggctgtcttttccgtatcctgggatacaggcacatggaggtggtccaggagacgccggttgcccactgccaccttccatcccttccaggtggtgatgatgcctgccccggtgatgctctcaaatgcttcgggcatggccaggtccatctgcttctccctggcggcgtttacaatggcctggcccaggggatgttccgacatctgttcacaggaagcagcgattcccagaaggtgctcctttttctcgtcgtcagaggcctgaggttccctggcgctgtccttggaagcactgccttcctggttctcacccgcggcaggcaacacagcccccggcacagaggaggattccagtttccacacctgctccaccacagcaccgctgattacatttacatcggtcaccttgggttttccctctgtgatagtccctgtcttatccagtatgacagcatccaccttatggcaaatctccagggcctctccgcttttaatcaaaataccgtgcccggctcccactccggttcccaccataatggccgtgggcgtggcaagccccagcgcacaggggcaggcaatgaccagtacggccacgaatatggtcagcacaaaggaaagttcctttcctcccaatatccaccacagcagggccgccaccagggcaattcccatgactgcgggaacaaagtatccggccaccttatccgccagcttggagataggggccttcttgccctgggcatcctcgatcatcttaatgattttagacagggtggtatcgcttcctacatgggtcacttccacctccatggctccattgtaattcatgcttccgccgatcacgctgtcccccggctgtttctccaccgggatgctctctccggtaagcatggattcatccacgctgctgctgccctgtacaagtataccatccaggggtatccggctgcccggttttataaggatatgctgacccacacacaccagggaggtctccacttccctttccatgccgttctcatagagaatagctgtgtccggcgccagctccatgagcttgcgtatggcctcagatgtctttcccttactgcggctctccatgaatttgcccagcatgaccagggtgaccaccacggccgccgactcgtaatacagctggtgggccttcatgtgatcttcgggaatgccaaaggtcatcacaaggctgtagataaatgcgcttcccgtaccaatggccaccagggaatccatgttgggattgcccttaagcagggaacggatgcctaccagatagaacttacgtccgcaaataagaaccggtacggtcagtatcagctgggccagggcaaaattgagaggattcttatccatctgcatgaacgccggcaagggcagggtaaagggcagcatatgacccatggaaatgtagagcaaaggcaccgcaaaacagatagctgtaaccaccctgcgcttcacagcctccagctgttcctcctgctgctgccattcctcttcttcctttttcttgttctgttcttcctccacaatcaggctggcagaaaaacccgccttggataccttctcacaaatcatttcaggtgtcacctgactctcgtcataggtaatcaccatgcggttggtcgtcagattcacattactgctctccacaccgtttaactttctcgtaacacgctccactgcgctgctgcatgcggcacaggacattccgtctatatgatattgctgcgtggtcatatgtttcactccttccttataccccacctgggtatattgcaattatagagcactaaccgcatattgtcaataggtagtatgcccggaatgaaaaaatttactatatttactgattcagcaaaatttatgattactcaaaaacagacagatgcacggcggggataatcttgtatccctgggtgcatctgcctgttttcttatatgtcttcttttttgctttcgtatctgtcttcttatctgcttcctcatccgtttccatttataacagcttatatcaggaaagctctgacccgcgggttcccttctgcccaatccgtatttcaaatccagccccggccgtcacggcctccccgctttttacggctacgctttctcctgtggtaaaaataaccatggtggtcagatcttttccagacttcctcacttcctccaaatccacgtccaccagacaatctcccctgcgtaccttctgtccctgggaaacatgaaggcggaatccctttcctcccagttccacggtattgataccaatgtgaatcaggatttccattccattctccgtgcggattcccactgcatggcccgtgtcaaaggcagcttcaattgtaccgtctgccggtgaaaggatacggccgctggtaagctccaccgcaaaaccgtctcccagcacccttccagcaaatacctcatcctttacctggtccagaggcagaatatgtccgtctgccggagaaaccatatcatatactgcttcccctgttatttcacccggcatttcaccggcattttttcctgtcaactgattttcccggaacgctgggtcatggggttctccgtccgcttccagcacctcctgtggaattccgaaaaggcatgtaaggaaaaaacagcatgcaacagaacatatggaaatgatgaaataccacatcagctggtttcccttgtatatatacatcagatatgagggaagcaccgccagtccataggaatttgactgtattcccagcacggacaaaagcgctgcccccaggccggacgtaaacagcatgatgacaaggggacggagattgtagcgcagctggattccaaacagcaccggttcactgattccgaacagctgggacagcatggccccgatgctggtggattttacgctctgtttcctggatttcacaaaaaaggcaaggcaggttcccacgttggcaaaaccgtacatggcgcataaggtaatgacagggttaaatccggtattggccagcagagaggtctctatcatggtataggtgtgatggagtcctgtaatcaccagcagcggataggtggctccaatcaggaatcctcctatgccaaagggcaggtgcaccagcatctccacaatggttaccagcttaagctccaccacatgcatgacggggccgattcccagcatcaccaccagaaatgttcccagcatcaccagaaagggagtcataatcaggtccagggcattgggcataatttttctcagctttttttccatggaagcccccagaaacgctgccaggatagctgtcagaacgcttccctgacagcctacaatggggatgcgtgaaaatgccatcactgcctccacgccgctgccaggagtagccaccgcatatgcgttgggaaggctgggggataccagcataagtccgatgaccaggccgatgaccggagttcctccaaacaccttgaaggccgaccagcatataagggccggaagaaaggcaaaggcagtctctgtgagcacgttcaccagggtcaccacatagtccggtatgatggatgcggacaggcccagaaggcccagcacattgtcattgaacacacagcccttaagtcccaggaacagaccggtagctgcaatcaccggaatgataggaataaagatgtcgcccagcatgcgcatcatgcgcttgacgcccttttgctggttctttaccagttcatcctgttcctgcttggacagggtattgagccccagcccttccatctccccatagaccttattcacaatccctgtgcccaggataatctggtactggccggcgttgaagaaggttcccttgaccatccctatttcctgaagcttcttttcgtcaatccgctccttatcctttactatcagtctgagccttgtggcgcagtgggtggctgacaatatattgtcctttcccaccgcctccactatccgtcctgccgcatccctgtactgattcccttccatcactattccctccgcattctaacagctgccctttaaaagcagcgcctgatatggttccaaataaagcgttccgtcctctatgccggttctattaccggcggtttctttgccggctgtctttttgtcagctgtttccccattaaacatcattccgtccattgcctcccggtcattggcccatatgcatcctgcactgattcccggcagtctctccaccgtccctgtaccgctgaaattaaagtaacaccagataaccgtatcctctgttcttctctcataggcaattacatgttcgctgcacgccagaggacgtatggcgccgtataccaggcagtccctccagggtccccactgtctgaaccgaatcatggagcggtaaaactccagtatgctgtccctgtccccttcctgggtttttgcgctgttctccggatattcccggctcatgggcagccatggcgctgtttcagaaaatccgccgtatcgcccgccggtccatgggaacggagtcctggcattatcgcggcttctcaggttgatgatttgaagcgcctcctcttcactgaagccttcctccagggaacggtggtactggtctatgctggatatatcgttaaatgcatccagggaactccgttcaaaattcaccattcccagctcctgcccctggtacaggaagggggttcccctcaggaagaaatacatggctgccagcatcttgacagcactgggattttctgctgcttccttcagatatttggttgccgctctgggctgatcatggttttcgatgaagttggccccccatccataggtctggacagccatctggcttgccatgattttatccttaagctctttcaccgtccattcccttcgcttaaaccattcgctgcccgaggctatatctaaatccgcatagcggaaatcaaatatcatggaaaaataaccgttccttccaatgaaatcccccagtccttcatagggaacgccaggcgcctccgccacagtcacacatccatggctgtcaaaggtttcccgcttcagttcattgagaaattccccgattcccggctggttcctggaagccttggtgcatttggcccgtccgtctgccccgtccggctcttggtctgcaaaggtcaggtctttctttataaaggtaatggcgtcgatgcggaatccggcaattcccttctccagccaccagttgaccatctcatacagcttcttccgaagggtttcattttcccagtttaagtccggctgtttcttcccgaatgcatggaaataatattcactgcgtccttccaccttttcccacacactgcctccgaatacagaacgccagttatttggttccctgtcccccttcttaaatatatagtagctgtgttcctccccttcgggatcctccagggcctgtctgaaccatcggtgctcatccgaggtatggttgataaccaaatccagtatgattttgattcccatatctcccgcccgctctatgagctcatccagttcctccatggttccgaattcaggggccagtgcacagtagtcggacacatcgtaaccattgtcatccatgggagactggtatatggggcagagccacagcatagtaatcccaagcgccttcagataatccagcttttccaaaatcccccgtatatcccctataccatcgccgttgctgtccttaaagcttcggggataaatctgatacaccacctcttccttccaccacggttcctccggcctgattcttaactgctcttctgctctcatctaatcctctccttctcccgataaattttgtctaatatcactctgtatgatatatccctgcccatatctctctgcctgatatatccctgcccaacatctctcttcccggtaaaacctcactcgataattccccgccttaccagttccctgtatatcccatcacgggcagccggcctgcacagggaatccgcccattgcttcagctcctcatccccgtcttccatggccactccgattcccgttgtccgaatcatatccacgtcattctttccgtccccaaagctcatggtatcttccaatcttattccgttgcgcctgcaccaccagcgtatggcctgccccttggtgcagcccgcaggctggagctccagatatccccattttctgattttgccgtccgtgggggcagactgctggacgacagcgccccatcccggaaccgttgcacacacggcctcccagtcctcaggccggcaccacagacaaaatttgtgtatgtgatccgggctgtgcatatactctttaagggtatcttcatatgggatactgttttccttctcccgtttccttatttcctctgctcccagtccctttagcttgccgataaagtcctgtctaagcagcactgccgcagccctgttcatgaatatacgctcctgggactccatggcaaaaggcagttcccttgttaacaggtatccctgaatccgttctgtttccggtttttgaaaataacttttcttctgcacatatccgttttccgcgatcagacagccgcctccggctatgatgccgtctgtatccatggacaggatttcctcctgaatggaagccagattccgccccgtgcatatcagtatccggattcccctttccctgcacatgcggaccgctgtatacgcgctttggggcacaccgctgcattcgtccctgagtgtgccgtctatgtccaagaaaattgccttaaccattttccctaccttccttatctgtgtgacctcattctagcaaaaaacaaaggccccggcaatagcctggacccgcttaaaatctttgtacacttatagtacattttttcggtttttgaatatttgtaaacatgttaaaaatgcttatttcagagatttacagggagtccaaccggcgtttcaggaactcctggtatgccagatacagatattctatcagaataaaatagggggtggatatctcatattcaaccccgtatctggccggcagggtgatggaatggatatagagattctcatcacagacagatgccagtgtattattgcccagccgggtaatagaaagggtgggcacttgtctcagccgcagttcccgggccagacttaccgtggcctcagactccccggtcagtgatatgatgactgccatgtcccgttccgtcatcaccctggacaatgcgccccgcatgtcgtgtccatggatatgaaacatttccttcaccggaaggaaaatgcgcttcatctcgctggctgccctagtctgggctgagccgctgccatagagaaatacccgccgggccctgtacagcttttcaaagagggaatccaggccgcggccaatcagctcatccatcattttgtggtaactgtctgtcaccgtattaagcagctcttccccaggccccagggcttcttctgtttcctgctcctccagtctgagcctggccttcagctccccgtatcccgccaaaccgttcttctttgcaaaacgcaccaacatggattccgacacatgacagcttccggcaaattctgttatgctcatgacggcgcactcctttttatgctccagcaaataccggcagatatactgttcattttccgtgaacctgttataatttttattgaacgcttcttccagtctcatggcccttcctctcatattccaggtaatttaccgacagcatgtctaacaggatgtagaatgcagccaccatctcatatcccggctccccgcctccgcttatcattctggttccggcatagagattgtaccggcacatccgggccatggtattattggtccagcgggtaatggacagggtttttatttccctgcactggacaaaacgcagtacctgtacgccgttttccgattcccccgacaatgagatggccacaaacaaatctccggacttaaaataccgggaagcgtactccacctccccgtaatcgaataaatcaatgcagcactttccaaacatcaggaaaatacgtttgaattcctccccaatggccttctgctcatttcccgtgccatagagatatatggtacccgcctcatggatggcctccagaatcacgctgtagtcgtactccctaaggccgtccaccatgcggtggtagttggatatgatttcctccatatccaggcaggccagctcctgcatcccggcccgttctttcagtaaaagcctgaactcagcaaagccgccgattcccagttttttaaacagcctgatcagggttgtcctggacacatggcagaaggccgccagttccgtgctgttcataccggcagactgcgccttgttccgtaaaatccgattcagaacctccctgtcattggccgtcagacggtcgtagctttcattgattctgtattccaggttcatggctgtctccttcccttggactccttcactgcgcttccgttaccccaactacactgtaaaggaaaatgacccggatgtcaatgacccctgcgtcgtattctcttttattgccagacagggttgtggggagtaattttcataagacacacagaatcccccatctttatacttttcagtaactcaacatccactttacaggcaaacgcttgttcaaaaaggaccttgctgtagccggtagtacactggcaccatgcggctgtctctaatcgttccacctcggcaagcataggacagggacaaaaatcaaattgcagaaagagctcgccgcctttacaaaacagacccgccgcctttgccttctctgaatttgtaaattcttctatattagcagctcctgccatcagctcctttacaagcacaagcttttcgttcattccgtaaccgcattgacagttcattcgtatttccttgacatcctctgattcaaatttattttccagacgccgcataacagacttcacccagtcagaattattttccgtatgagcggccttctcacagccgtataccacttcaccagccacatctgcattgctttttgctctgacagcttcatacattactttctcctgcacttttcttatatcaaacatattttcctccgtatttatcttgtaccaatttctataaaggcttaatacttcttatattataaaaagaaagcgcgctgcccgcttctgaattcttgctgttatgaaattgggatgtacaaatccattataacgctgtgattatcccggtcaacgcggcgataaatattgagtccatatctccgcgtcatcttataaccactttggggaaaccaaacgctgaaaatcccctccagtgtttcaaagatgtctttgatctttccatcgaaatgatatacgatccattggccgccgctgatccgcataacattacttagcccacaatccggttccacagtcatacaaatatcgcagatacattgcagcgggctggtaatagcagggtcattaaaaaaccgctcaaccaaaagcgtcttttcattcaaaaaatccttgtacttatctaaaaactgataccagtttttttcaaggtccgcataaattccaataaaacgttcatacagcacaaacagatcctcctgcttctggacttcgatttgtgcggtatattcctccgctgttttaaaatggacaatccgctctgaggaaaagggaagagacatactgcgggtgggtattgactgcctaaacatagatggcggggtatcatggtgctgtctgaatacggagctataattggacgcactatatccgtaatccaaaccaatgtctgtgattgcttttgctgggttgagtttcatgtcgattgcgctttggtcaattttacagcgcttgataaatgcatagacactttcgccagtttcttccttgaagattcggctgaagtggtatttcgatataaaaaaatgagcggctactgtatcaagagacaaatttttatctaaatgtttcataatataatcaatgctctgattgataagtttttttctatccatataccattccctaatgcttaaaagcatcattaatcttttccttacaagtaaccgctgtcagatatatagtatacagctgttctaaatgattgacaacgcctgtaaaatccgttctttaacagcctgcctcaaattctccggttccaggatagttacattcccaccaaaggatagcaaaaagctgtaaagccattcagaatccggtaattgcgtttctactatgatgttatcatcctgccgaatcatagtatcatcttcaaaagcatcatataaacgatatgctaccgacttattaaacattagccttacattgagcagaggcccgtaattcccgtccagcgtaaaatatggagcttccttttcaggagaatattcaaagagttcttctgtcagtccagtctttttcatgcgggaaagccgaaacacacgcggttcttgtctcatgagacaatatccggccaagtaccatgcacggcagcgataaatgagtttcgcaggttcaacagttcgtaccgtcatttcacctttggcactataatattcaaagtgaatacgccgcagcccggtaatagctttacgaagtattgaaaatagttccttatctctgtgaaccgtttcggctgttccccagcgtgttaagtcaacatcaatccaatcgcggttctggctcataaatagcgcgcctaattttagaagaacagggtcaatatcaggatattgaacagctcccagcccttgcagcgctaaaagtatttcagcctgctctgtctttgaaagcgttattttatctaaccgatatccctccaaaagatagataccgcccttacggcctccctgcatgtagattggaataccagcagcactcattgtatctatatcacggtaaatggtccgtactgaaacgccaaattcttctgcaagttctggtgcagtaacccgctcattgttcagcagaatatataaaatacggaaatggcgcccttcatgcatttttgcccccaatctttttcggcttgactttaacgcctaccagtcggatcaggtcaggcagttcttcatcacttataaccgaacgattaagccaaccgccgtctgcaccgcaggcatatcggttaagccagcttgcttgtatttccggcaacaattcgccaaatatggaatcaacctcctgagcgcctttatcgttgatagaaatagtacagcaaaaaccgccttcttcaaaaaacacatacagcagcaacgactttttatgagaataccggaaactccagccatattcattgccgaagggaaaccttatttcgcggcttacatcgtaccgctctcttagcatttcctcaaagcgcattaaacgcttccaagcctcaatgcccataaaaatccggataagagactctggcggctgttgatatttttcagtcagccttgttttctttttttcatatcgaattttttctgccatatcaaaacacctctttaatctttatctgttaattatagtataccatagataccatgacacgctctgtcatgtttttgttgggttagtcatcttttttatttgagtacatggttgtcattattataaaattaaaaaaatcccataccggcggaaacgccgcacattgtctccaatggcggcgtttttgttgtgtgttggctcctgtgttttcatttgtcttattatgcccttgcctagaaccgctaactggtatgtccctacataaccttctgcaaaagccttctgaacaccagcaggagcaccgcaaaaaatacggctacggatatcagggtctttgtcacggtcatgctgatgaacccgcttataaggattccgatataaagcgatatcatcatggtgtatcccgtataggcccagcagcgcagccccagcatacggttcctctcatcggtctcatatatcctgcgcttctccttaagctcgggatttcgcagatatttcagattgcgcatgatggatatgacgccggccgcggccaggccgaatccggtcccactgtaaaatcccggcataaaatccttgtatccctgttccagatacatcaccatagcgtggtttctgatcgcaaaggacaggcctatggccgctgcgcccaacaggataaaacatattccatacacaatcctgtttctgcacctcttctcaaaatcaatgggattttcaataaataactgattcagccacataatcattcctcctcttcaaataaaaatatatcctctatgctctttccgaaaaatcttgaaatcttaaaagccagctgcagggaagcattatacttcccgttttccagggatattatggtctgcctggtcacccccagggccaaagccagctcctcctgggttaccttgttctgtttccttagttcctgtatcctggttttcaatcacaccaccctctcgtttcgttcttaccctatttgttctaacctcattccggcatcattcattccggccttaaatcttcactcctcattctcgtctccatctcttacagtatagttcgctttacatttttagtatagtatacttaacattaaatgtcaaggttgttttacattttttatccagaacaaaatccggaagacaaaaacctgaatacaactatctgaatacaattatctaaatacatctatctgaatacaaaaaccgcccctgaggattccggttacagcggatccccaggggcagccctttgcattcattctgttcttgtcaaatacactttttaattaccttttaatttcccagaaacttggaggcatatccctgaataaatatgataagtacaatcaaaggcaggatatagctcacataaaccctggtccatgcggggaaatgaatcccctccccttcattggcctccgccataaatttcttaaagccccatccgtaacggctggtgcaaaacagcagataaagcatgctgccgataggcagaaggttgttgctgaggataaaatcctccagatccagaaccgtgcttccttctcccaggggggcaaagctgctccagaggttaaagcccagcacacatggaagggataaaatgatgatggcggctatgttgcagagaaccgccttcttaagggtgcagcccgtcaaatccgtggcaaaggaaatgatgttctggaacaccgcgataatggtggaaaaagccgcaaaggacataaacaggaaaaacagcgtcccccagattctgccgcctgccatatggttaaacacattgggcagggtaatgaaaatcaaggacggccctgatttggcctcaatgttgtaggcaaagcaggccgggaatatgatgagtcctgccatgaaggccaccagggtgtccagcagagtgacgctgactgcctcccctgtcagtgtcctctccttgccgatatagcttccgaagatggccagggctccgatgccgatgctcagggtgaaaaaggattgtcccagggcagcaaacacggcttccccgatacccgactccaccattttcccgaagtcaggcttcaggtaaaactccagaccgggaccgcctcccggcagaaccatggaatgtacggccagcaccaccatcagcaccagcagacacaccatcatgacctttgtaatgcgctccacacccttctgaagacccatggcgcagactccaaagcacaggagcaccacgatgaccatgaatcctcccatcagcgcgggattggccagcatactgacgaattcaccggccactgcttctgcatccatgccgccgaaatcccctttaagggttttaaagaaataaagcatcatccatccgcccactgttgtgtagaacatcatcagaatatagttgcctgccatggcgatgtacttggtcagatgccacctgcttccctttggctccagcagatcaaaagacagggcagcgcttttccggcttgcccttcccactgcaaattccatgactacgatgggaagtcccagtatcagcaggaacaccaggtataccagcacaaaagcggcccctccgtattcgcctactatataagggaaccgccacacattgcccagaccaatggcgcaccctgcgcttataaggatgaagcccagcctggacgagaatttttcgcgttccatctatatatcccccgtttcgtattatatcgtgagttaccggccttttcagacagccggactcaataaaagagcccttaaccctaaggactctttcatatactaccatattattacataaatatcaacctatctctgtcctttgtcgtagggaacgccggaggccctgggcgcctgggagttcctggatgtaaatacaaggacaatcagggtagccacatagggtatcatcttatacacatagctgggtatccctgttgccgccaggaacggtatgccggaataggctgccgccaccgccttcataaggccaaagaacagggaggcccacatgattttcaccggcttccactgtccgaagataaggaccgccagggccaggaacccgtatccggccacatccgcgttaaagttggtggatgtgggcaccacgaacaccagcccccctaaaccgcccaggactccggatatgaggacgcctgcgtattgcatgcggcagacattgatgcccgctgcgtctgctgcctggggatgctcgccgcaggagcgcagcctcaggccgaacctggtccggtaaagcaccagggtggacaaaatcagaatggcgacgcccagatacgtggtgatgtatgtgttctggaataacaaaggcccgaaaaacgggatactgcccagcaggggaacggattcaatccggaaggtattgttaaactggatctgctgtactccctggatgaccctggccacaaagatggcaaaggccggggcaaacatgttaagggcggttccgctgatggtctggtttgccttcatgttgatggatgcgtaggcatggaaaaaggcaaagacagctcctgtggccgtggagataaggatggccagaagcagctgcatctgtccgctcatcctgcctcctgtcatgttcaggaacaggatgcctgtaaaggctcccatggtcatgattccctccagggcaatgttgaccacgccgctccgctcggaaaacatgcctcccagtgccacaatcatcaggggaatggtaaaaagcatggtctgctggaatataaaataaatcacactcatgtccggccgtctcctttctcccgtttacggttcatccgggtcaggatggtcttcactatcagggcaaaggcgctgaaataaataatgaccgccacaatgatatcaatgatctccgtggagaattcaaagagctgcaggtaaaatcccccggctgtcagatacgcaatgaacagcccggaaaacagcactccgatgggatggctcagtcccagcagcgccacggagataccggtaaagccttccgacgcaagcacatcctttatctctatgtgcttgccggtgcctgccaggtagagaagtccccctgccatgcctgctatggccccggctatgaccatgctcatgataatattccttttttcattgatgcccgcgtacctgctggcatccctgttaaagcccactgccttaagctcatagccaaaggtggtcttattgaggataacccagataatcagcacggcggcaatggccagaaggataccgccgcccacgctggactccggaaacagcttatccattcccatcttgggaatctgggccgtggcagccacatttctggattcattgcgcaggttgttaaagagaggcttatagctctttacaatccagttcaccatatacatgccgatatagttcatcataatggaggcaataacctcatttacattaaagcaggctttcagaaatcccgggaccattccccacagagccccgcccagtattgctgccagcagggccacggcccactgtatcctccccagccccgtccacatgatacccacatagactgccgcgaaggcgcccacaataaactgccccggtgtaccgatattgaacaggcctgtcttaaaggcaaagccaacggaaagaccggtcagtatgatgggggttgcatagtaaaacacctgacccacgcccttcagaccgtgggtaaatgctcctgtcaggatggtcacaaatcccggcagtgcctgggacggattgcatataaggagtatgacaaatcctaccagcagtccgataacaatggcaaagaccgatgaaagcacgcctacataatcccgttttctccctgtcctgttgtttgtgctcacgccctctcacctgcctttccttctggctcctggcgtttggaacctgccatgtaaaggcccagctcctgtaccgtcacttcccggggattcaggtcagccacaatggttccctcaaacatgaccagaatccggtcgctgaggttcatgacctcgtccagttccagggatatgagcagaatggccgtacctgcgtccctctgctttaccagctccctgtggatgtactcgatggcgcccacatccagccctctggtaggctggaccgccagcaggatgtcgtggtccctggatatctcccttgccacgattgccttctgctggttgcctccggacatgctgcgggtgattgtgtccgctccctcgccgcttcgtatgtcaaagtcctcaatcagcttgctggcatagttataaatctcctcatccttaaggaacccccagcgctggaacccaggttcaaaatactgctgcagcaccaggttataggccagattataatccagcaccaggccatgcttgtgacggtcctccggtatatggctgagtccgcctgtattgcgggcgcgtatgctctttttcgtcacatcccggccgtttatgaggattcttcctccggcggtttcccccaggccggtaacggcgtgtaccagctctgtctgcccgttgccgtcaattccggcaatacagacaatctcaccgctccttacctgaaagctcacgtcatttaccaccagcttggtatggccttccatatgggatttcacggaaacatgctctgcctccagcacggtcctgcccggcgctgccggagtcttttcaacagacagactcaccttgcggcccaccatcatctccgacatctcttccttggtgatggaagccacgtccacggtgcctatgtattttccccgccgcagtacagaacacctgtccgccactgccttgatttcatccagcttatgggtgatgaaaagaatggacttgccttccgccaccaggcttctcatgatttccatgagctcgtcgatctcctggggcgtcagaaccgctgtgggctcgtcaaatatcatgatttcattgtcccggtagagcatcttaagtatctccacccgctgctgcatccctactgttatatcctgaatcagcgcgtccgggtcaatgtagaggccgtagcgctcgctgagctccaccaccttcttcctggcgttgtccatcttaagaaagccgtgactgactgtctccattcccagcacaatgttctggagcacggtaaaattgtgtaccagcttgaagtgctggtgcaccataccgattccaagggcattggcgtccaaaggcccctttatcttcacttcctggcctctgacctttatgattcccttctccggctggtaaaggccgaacagaacgctcatcagcgtggatttcccggcgccgttctcacctaacagcgcatggatttccccctttctcagctgaagggtgatgttgtcgttggcaatgataccgggaaattcttttgtaatgcctaacatctcaataatgtaatcatccatacggttccccctcatataaaaccgtccagacagcatgttccggccgccccaccgcccggcgggatgaggtgttccggtataacagcagggtgccggacatgccggcaccctctgtgtcatgactatctgccgcaggtcatttcaggcccttgtacagcccgtattgctgccagtccctactccacaaaggtaacctttgtattggtcaaatcggtcaaatccttcgttgggtcattattatccgctgagaactgaaccagcccaatctcgccgtcagccagtttcttgtaaacggcatcgtactgctcctgggagaacttctcaaacttggaggtatccatgggaagtcccacgccgttgttggcaacggtaaacacggaggtcttgcctccagggaagctgccgtcatagaaatcctttaccccgtcgtacacggagttggaaagaagcttcatggcagacgtaatcacggtctcggattcagcactctggtccacgtccacgccgattacctttgcattcttttcctgggcggccgccatcacggaattacctactgctccgccgcatccgaagattacctctgtgccgttctgataccaggaagcagccatggactgcgcctcaggcgtggctgaaaatgcacctgtgtaattatacatgatttccaggcctgtgatcccgtcctcctcggccgcaaactcagcgccctggacaaaaccatatccaaaacggataacggccggcactgccatgcctcccataaatccaagcttcgtatagccgtcctttacaaccgcataaccggccaggaaacctgcctggtcctcctggaacagaatgggcattacattatcatttgtcttataattgtagtccgcatcatggggctccccgtccagcaggataaagtgcacatccggatacttgtcctgggccaggtagatgggctcctcaaacaggaatcccggacataccaccagcttagcgccgccctcaatggccaggccgatggtttccaaataggaatccgtcgtgccttcctggggctggtaatatttataggagatgctgttctcctccgcgtacttcttaagtccttcccatgcgccctggttaaaggacttatcgtctatggtccccaggtcggtgaccagggcaagctcatagccttcggctcctcccttggatgaggatgtgtttgcggcatccccttcccctgccttggactcttcctttgcttctgatttgctctctgaagccggagcttctgtttccgccggagctgccttggtgtctgttcctgatgagcctgagcaggctgtcagggaaccggccatgaccgctgccatggcaagtgccagtatcctttttttcataagcttgattcctcctcttcaaatatggttgcgtagcgtctcagtacaactctaacttatcataaattacaaattattacaaccatttaaccatatttttgtcatatccgccaaaacataaagggaggggcggcatgcttgggcattaaccgcctctcccggattcctgcataaaagctgtttataaatcaaacaaggataactgattggattttggaaggtccttaagcagccccagatccgacataagggaacaaagggtgccgtttaccttggaacggttgctgaaatcctcgatggacaggaaagctccgtccttgaccgcatccaccactgcatcagcagccttctcacccaggccgtcgatgctgctgagggatggcatcagcttgccgtctatgatttggaagtgccgcgccttggcccggtagatatcaatgggcgtaaaatcaaagcctcttgcatacatttcctggacaatcctcatgtccctcagggtatcctgttccttcttggacagggtgtccgcccttttcttataatccgccagatagtattccagcttatcccttccctggcacatgatttcataggaaaacgcgctggcccggatgctgaagaacgcggcgtaataggccaggggataaaatatcttacagtaggcaatacgccatgccatcataacgtaggcagccgcatgggccttggggaacatgtacttgattttcttacaggaccagatataccattccggaacgccgtgggctttcatctcctcctcccactccggctttaatccctttccctttcgcacgctctccatgatggtaaaggaaagtccctgctccaaaccctgggcaatcaggtaaaccatgatgtcgtctcgggtacagatggcggtctgaatggtggccttcccctcctgaatcagggtctgggcattgcccagccacacatccgtaccatgggccagaccggcgatacgcaccaggtcggagaaatacttgggcttggtgtcaagaagcatctgcatggcaaagtccgtaccgaactcaggcacgcccagggcccccaggggacagccgccgatatcgtccggcatgattcccagagcggacgtgtcctggaacaggctcatgacctcccggctgtccaggggaatgtcctttacagggtcaatgccgatcagatcctgaagcatacgtatcatggtgggatcatcgtgtcccagtatatccagcttcagcaggttgtggtcaatggaatggtagtcaaaatgggtggtgaccgtggaggtggtcatatcgttggcagggtgctgcaccggggtaaaggaatagatttcctcgcccagcggaagcacgataatgcctccgggatgctgtcccgttgtccttctcactcccacgcagccctgcacaatgcggttaatctcgcagtttcttttcctggttcccctttcctcataatatttctttacatatccgaaggccgtcttgtccgccagggtgcctatggttcccgcgcggaaggtctggccctttccaaagataacctccgtataatcatgggccttgctctggtattcaccggagaagttaaggtcgatatccggctccttgtctcccttaaatcccaggaaggtctcaaaggggatgtcaaacccgtccttttccagcggtgtgccgcacacagggcattccttgtccggcatatcgcatccggccatgccggagaactgcttcacttcttcggaatcaaagtcatagtaacggcacttggggcaatggtaatgggggctcagcgggtttacctcggtgattccggacatggtagccacaaaggaggaacctacggaaccacgggaacccaccaggtatccgtcctcattggacttccacaccagcttctgggcaatgatgtacataaccgcgaatccgttggtgataatggaatgaagctcccgctccaggcggtccactacgattttaggcaggtcctccccgtacatctcatgagccctgtcataacagatcttggtcagcgtcttatcggaatcctcgatgacaggaggacacttgtccggccgcaccggggcaatcttctcacacatatcggcaatcttcctggtgttggtgatcaccacctcatgggctttatccggtcccaggtaggaaaattcctccagcatctcctctgttgtcctgagatacaggggagcctgatcgtccgaatccttaaatccctggccggccatgatgattctgcggtatacctcgtcctggggatccaggaagtggacatcgcaggtagcgcagaccagcttgttaaactgcattcccagttccactatctttttatttatctcgattaaatcctcctgggacttaaccgtgctcttctcgtcccggagcatgaacgcattatttcccaggggctggatttccaggtaatcatagaaactcacaagccgggcaatctctgtatccggagcgccgcgaagcagggcctggtataattctccggcctcgcaggccgatccaataatcagtccctcccggtatttctccagcaggctcttgggtatcctgggccttctggcatagtactccaggtgggaccagctcaccagccggtacatattcacacgcccgatatcgttcttggccagtatgattacatggtgggtggggagcttgcgtatggtatccgtgtccatggtgctgagggcattgagctggtttaaatcatttacatcccggtcccgcagcatctttacaaaggcagcgaatatctccgccgtggctcccgcgtcgtccaccgctctgtggtggttctggagcgaaatattaagggctttggcaacggtgtccagcttaaaccggttaagattaggcagaagaagcctggcaatggcaaccgtgtccagcaccgtggggtcaaagggcagttccagtttctctgcgaaatggcctataaatcccacatcgaagcttgcattgtgggctacaaggaccgcatcccccacaaactccagaaattgcggcagaatcacgtcgatttttgggtatggaagcaccatggaatcgttgatgcctgtcagcttctctatgtcaaagggaatgggcacgtccggattcacaaaggtggagaatttgtccgtaatcctgccgtctaccaccttcacggcgccaatctcaataattttgttctttttagggctgaagcctgttgtctcgatatcgaacacaacaaaggtgtccccaaaatcctggcccctggaattctctaccagctgtttggtatcgtccaccaggtatccctccaccccgtagaggattttaaaggtatcccccttgtccagggcgtggttggcatccgggaatgcctggacgcagccatggtccgtaacagccacagcgggcatgccccactgcttggccctcttgatgatgctttttacctcggatacgccgtccatatcgctcatctttgtatggcagtgcagctccacgcgcttttccaggctggagtccatgcgcttgctggtaaaatcatccgccttcttgattcccacgatggagccaagggtcagctcgccgtcaaacttgtcaatggtggtgactccctttaccttgataaacatgcccggattgatggcggatttcacctcatcaaatatctccggacggataaacattttaaccgtaatggtatccgtaaaatccgatacatcaaaggtgaggatgaacttgccgcttcgcagctcccggttctcgcaggtcagcaccttgcctcttaaggtcacttctccgatttccccgtcgatcttctcaatctccatgggctcgtcctcaaagtcacgtccgtagagcacatcggggttgttggaacgcttgacagagtacttcttgtcgtcgccgaaaccgctgtccttatcccgtccccagcccttgcgccccttgttgagctggggcttatctcccttaaagccctgcttctggccgccgccctggcctgactggcttgattgtccctgcccagactgtcctgatctggccgggcttccctggctttgggacgaaccaggcgcccctgaccggcccccgttatctccaggcgcgctcccgtctcccacatccccggaagcagcctgggccataagtgcatcccagggagcgccctccggcccctggcctgcgtccaaataggaatcctggcctgacctgccgccatttccggacagcagctcctggccctccagcccctgggtggagaaagaggcgcccattgcttccagctcctccctgtggttctgccagtatatggcctgggcctcccgctccattttaagctcaatctgttttctgcggtcgctgccctgtggctccacaaaggcaaagcgcacctccacaggcaggccgcaccgctccgcaaagaccttctctatgacgcgctttaactcggctgtcctgtcccggttcaccatggtgtcctccacggtcaagaccatgatatcctccttctcaaaggtaatcccggccttgcggaacatggtgtactcgatgatgctgtagtttttaagctccagaagaagactgtccttatatacatccaaaagctttttgggcgtatactggtccgacagcctgtatttttcctgaatcttgatggccacctgcttatccgggaacagctggtcccggatgcctcgctccaggtcgtatatattctgtttatgtatcagccttgcgctcttcagataaatgcggatagagcttctatccctggtggtggtcaccttctccacctgggccaggcctaaaagctccttcagggattccgctatattgagggttggaaatacttccagaaaattctttgccatatatccgtcttccttctatgcccggtgttcccggctcatggccagcagttcttcccgcagtactgccagaagctcagactcaggcaccttgcggatgatttcgccccttcgtatcagcaggccttctcccacgccgcctgcgatgccgatgtctgcctccctggcctctccgggaccgtttacaacacatcccatcacagccaccttcacatccaggtcatcaaactccgtcaccatgttctccacctggtttgccaggccaatcaaatcaatccgcgtgcgcccgcaggtgggacaggacaccacctcaataccgccctttctcagtcccagggtccgcagaatcagcttggcgctctttatctcctccaccggatctccggtcagggacacacggatggtatccccgatgccctcatgaaggatgatacccagtcccaccgaggacttgatgttgccggacatcagggtgccggactccgtgattcccacatggagagggtaatgggtccgcatggcaatcagctcatgggcctttacgcacatgagcacatccgaggacttgatactgatgaccagattgtcatagcccatatcctcgatgagcttcactttatccagagcgctctccacaattccttccgctgtgactcccccgtatttttccagcagcggtttctccagggaaccgctgttgacgcccacgcggatgggcaccccgtattccctggcccggtccaccactgcctgcaccttatggcggtcgccgatgttgccgggattgatgcggattttatccgccccgttctccatagcggcaatggccagacggtaatcaaagtggatgtccgccaccagcggaatatgaatctccttcttgatgtcagccagcgccgaggcggcttccatggtaggcacggccacgcggataatgtcgcagccggcctgctccagcctttggatctgctccaccgtggcgtgcacatcctcggttttggtattgcacatggactgaatcaggacagggtttcccccgccgatgacccggtccccaatctgaatcacttttgtatctttcctggtcatatatacctctcttttctgaatataggacaaagccgttaaaataatttccggacatcgttaaacaggataagcaccataagggccagaagaaccatcattcccgccatgtggaccatgccttccttttccttgtcaatgggctttccccttacggcctctatgatgaggaacacaaggcgtcctccgtccagagccggaatgggcagcaggttcatgacgcccaggttggcgcttaagagtatggtaaaattaatcagcatgagcaccacagccgacaggccatagggcgcggtttcatccaccgtggtgtcaatggcgttcacaatccccacaggaccgctgatatcgttgaccgaaaccatgccgtggaacatcatataaaaggtgtcaaacacatagtgaatccagtactgtacctcataggcgctgtgtaccagaagctgccctatgttctctaccgtgctggggacagggttaaactggacccccatcatatactggttgttctccgcggaaaagacaggctccagctctgtgctgaagcgctcggtccctcccccttcctccgtcctctcccaggtaaccttaagagatttctgcgggtgggtgaacaggtaccagttaatatccctgtaagaatggacctttctgccgttaatggatttaatcacatcgccggcctccatgccggctgcctgggccggatacccgtccacaaccccggccagccgggtggtgtcataccccgtaataccgatgagcaccatggaaaggccgaaggccaggataaaattaaacacaggtccggctgccaccacggaaatcctggcccatacggacttgttgttaaacgcgctttcgtctgttatcccctcgtcttcccccagcatcatgcaggagccgccaaacggcagtatcttaaaggaataccgggtgccgcctttctcaaagctgaacagccttggccccatgccaagggaaaattcaatcacacctatcccatttaactttgcaaacaaaaaatggccgaattcgtgaatcatgataatgattcccagcatcagcatcgcaataatcaagctcatccggctctcacctgtccatccggcgctccgccgccctttttacgcgcggcgtgcgcctcctttctgtcttaattccatttctgtcttaattccattttgatgatagataatcgtaagtttcctgttctgcctccagaatctgcgccacgtcaggggagggctttacacagtgatgctccatggccccctctatcatatccacgatggccaggtaattgattttccgctcaaggaacatggcgactgccatctcattggccgcgttgaacacagttggcagggtaccgcccctgcgccccgcctcgtaggccagcttaaggcccctgaacgtctccatatccggcacctcaaaggaaatctttgtaagcttttcaaagtccagccggtcccccggaaggaaacggcgctccggataatagagcgcatactgaatcggcagcttcatatcgggcgtacctaactgggctatgacagccccatcctcaaattcaaccatggagtggatgatgctggccggctgtaccaccacctgcacctggtccatctccgccccgaacagccagcgggcttccatgacctccaaccccttgttgaccatggtggaggaatctatggtgattttatgccccatggaccagttgggatgctttaacgcgtcctccagccggaccttttccagctgctccctggtaaatccccggaacggaccgcctgaggcagtgagcagtattttgtgaaggggattgccggctgctccctgtaagcactggaatatagcagagtgctccgaatctaccggcagcagcttcacgcccttttccctggcaagaggcatgatgatatggccggccgttaccagggtttccttgttggccagggcaatgtcctttcctgcttccatggcggcaatggtgggacgaattccaatcatccccaccacggccgtcaccaccaggtctgcctccggcgacacggctgcctccatcagtccctccatgccgcttgccaccttcacatccatatcagctaccgcggcccgcagttcctttgccttctcttcatcccagagacaggccagcctgggcttaaactctcggatttgttcctccaaaagctttacattgctgccggcggcaagggccgtcacctggatgtccttattgtatctcaccacttccaatgtctgggtgccgatagagcccgtggaacccagaattgcaatcttcttcatcataacttatattctccctatcctgaagaaatactcaaaaagcccatccttattttaaaaatgtgagggcaaaataaatagcgggggccgtgaatatcatactgtcaaaccggtccaggatacctccgtggcccggaatcagatggccgtaatcctttatgttgtggtttctcttaatagcggaagccgccaaatcccctatctgggaaataaccgccgcaatggcgcaggcaatggtacaggccgcctggggattatcaagctccgccatgctggctccgaaaagggatgcatagataaagcccagaagggccgcgccggccacgcctcccacagccccctcaatagatttcttggggctcaggacaggggccagcttatgcctgcccaaaagcatgcctgtacagtaggcaaaggtatcgcagccccaggagcttaaaaatataagccacaccaggtatgcaccatcgctcatgtcccttgtctgatacagaaatgacagcatgatgggcacatagcatacgccaaagaacgcgcccgtcacctcctctgtcttatactcagggaaggtaagcacataaagggccatcatcgccatcaggcaggcgataatcataagcgtcacatagcgctgtccctcgaaccacaaaagtccataataggagcaggccgtcacatagcccacaacagccagggaacgccgctgcattcccagagccctgtaaagctcaaataaaccgatgatggatataagggccgtaacggcatatagcaggattcctccctgcccaacaatgacaatggacagaagcaccagtatgataccgctgattaaccgggtcgtaaacatggccttctcctttccctctccttactttgcagcgccgaaccgccgctctctcttattatactgcacaatggctttttctaattcctcctgattgaaatccggccagagacaatccgtcaccacgatttccgtgtaggccagctgccacagcaggtaattggacagccgcagctccccgcttgtgcggattaaaaggtccgggtccggcattcccgcggtatccagatacgatgcaaacagcgcctcatccacctggtccggatccgcctttccaagggcgcagtctcttgccagcccggccgccgcccggcggatctcgtccctgcctccgtaatttaccgctatgacgaaggtcagacctgtgttatcctgtgtctcggactccagacggtttatgccgtctatgatatccctgtcaaagcggcttctgtcgccaatcatctttacccgtacattattggcagacgctatctttaaaagccgcaccatatagtagcggaacagctgcataagcgcccctacttcctccgcggaacgtttccagttctcggtggagaacccatagacagtcaaatacctgattcccattctggctgcaatctcaacggttttctccacggtgacacatccttccttgtgccccagggtgcggggaagcccccgttttttggcccagcggccatttccgtccagtatcagggccacatgctccggtatgatcatatccttatctaatgccattctttctctgcctttcttgtctaaaagtaacttgcccaaataatatccttatcatgttatatctttccggtatcaaaaacaaattaagaggcaggagtccctcctgcctcccatattcatttatcacagattacacggtcatgatttccttggtcttttcttccactgccttgtcaaccttatccaccatcttatccgtaagcttctgcatcttctcggtcatctcggtcagatcatcctcagaaatatcccctgccttctctgccttcttaaaggcctcgttggcgtcacggcggatattgcgcagggctacctttgcattgtcgccctttttctttacatccttggaaacttcctttctgcgctcctctgtcatctccgggaacaccagacggatacagtttccgtcattagttgggttgatgcccagttcagatgtgaggatggctttctcaattggcttaagaaggctcttctcccatggctgaatcacaatcatgcgggcttccggaacagaaacattgccaacctgctggaggggtgtgggggtgccgtaatagtccaccttaatcttgtccagcacatggggattggcacgtcctgcgcggatggtgccgtaatcagacagcaatacatccagtgtcttattcatcttgtcctcataaacttttaattcttccataagttcctcctgttaatgcagccttccctgctgcttaataatgttcgttttattacgcagtaacgatggttccgttaatccggccctgcatggcgtttgcaattccgtccttttcattgagactgaacactgccatgggcatcttatgctccatacacataatagacgcagtcaaatccaccacagccagctgcctgtcaatgacttcctgtatggaaatggtgtcgtacttctttgcctccgggttcagcttcggatcgctgtcatacactccgtcaatggccttggccaacaggatacagtctgcttccatctcaatggccctgagggcaattcccgtatctgtggagaaatagggatgtcctgtcccgcctgcaaagaataccaccatacccttttcaaaatacttattcgccctgtccttggaaaacagtttggtcatggaaccgcactcaaagggcgtaagaatctgtgtcatcatgcctgcattcctgaaaatctcagaaacataaatgcagttcataacagtggccagcataccaatctggtccgccttggtcctgtcaatggcctcactggtacggcctctccagaaattacccccgccaatgacgattccaacctgtataccggcatctacagagagctttacctgcctggccacttccttcaccgtgtcctcgtcaaacccggtctttttagggcctgcaagggcctctccgcttaactttaagaatacgcgtttcatcttcataaagattttatctccttgttgcgatatctgtggctattatagcatagttaggtcaatttgcaaagaaaaagaaattatttatcattttttccatttcgtctaacatttcatggttctgccctttctttttccgtttttttaccgcgggtcacctgccctgtccttaaaaaactccgcctttctgttctctgcccggttctcaatatcgctgatcccttccagggatgtcctgtatttggacggtgtggtgtggtaaacctgcttgaagctgctaatgaaggaccggcaatacagtggcaatgccatgggccggacgcgtgaaagccatcctgcagatgggctatgcaggtgaaggcgccggaaaggcgctggcagatctgctgttcggagccgcctgccccggcgagaagctggccgccacacatcaaaggctgccgctttcaatttctgatagcggcagcctcattgttttaccccgatgatatgctatttccccctggtccaggaaaacaggaatcccagtacggccgccatggccatggtacacacgataagcccggaaaacctgagaaaataaaagttcatcagacgtataatccccgacaggccatggtccctgacgctccccatgactccgtcaaaaatggaggccccggccccgtaaatcgtaacggtaaacccttcctgcccgaatccgataacaggccccagtatcccggccacatccagagcaacccctgctgctatacagaccatcagggttttcaccacgcccagccctgtttttgcccacaatatttcaccaaacatgcagaacactccgcctgcaataaaaatcttaaccagctccataattaattcccccattttccaaatggtaaggccggctaaatccggccagccgcatacatcacaacaacggacacaacagccgccaggtatcctgcaaacaatatgaacagcccgtccttcacaccccgccacaacgcccggcccgctcccatgccctctttcctggctccgtgaaccgcgtcagtgatggcggacgagaagcctcccatggtaatcatggctcccatccccccaaaatcagtaagcttttggtaatggcctgttatggttgtgacagaaccaacggccgccagtgtgaatacggttacactgacagcaaacagttccggtacgccggccatgcggtatgccattgtcaggaaatggcataaaaagcagatagcgcctcctgtcagaaatgcgcctgcataacggtttatcttcatttccacctcatttccttctgcttttcacagcagaaatcgttcataaaaggtaacagttcttgcattttcccaaatcattgcctataattcctatatcagatgacgaatcaggttaaaggaggcttcaccatggaagacaacacacaggccgtacaggctctgagcaaaaaggacgaggcttatgtccggattaaggaccgcatcatatccggcgaatacaagcccggttcccttctggtggaacgcaccctcagcgattccctcaacatgagccgcacccccatacgcgccgcccttatggacctgtgccacacgggccttgccacctttgtccccggcaagggcatctatgtatctgtcatcggacgcagggacattgaggaaatatatgaaatccgtgcccttcttgatccggctgttctcctgtccttcatgaaacaggccaccagggatcagattgccatgctccgcacctttgccgataacatgcgggacgcggtgcgcatggaaaacacgggtatgctcattgaaaatgatgtcaatttccatcagtactatacggattactgcggcaatgccaggctggccgacatcatctgctccaccgtggatccattccaccgcttccgctacatcacctcgtcgtccatgaaaatgaaccgcgtatttgtggaagaacatcttctgatcatgaaggccatagaggataacgaccaggcagaggcagagcttcagatgaaggctcattacagtcatttaaaacgctatttaatacaaaagcttacatcggaggggcagctttgacaggctgcccttcctttcgtttacctgcataatccagtactgcgcgcttaagggccagttccgccatcatggcgcagtgcatgtattccggttccagccctccaagagccgttgcaatggcactgctgtctatggtgtaggcttccagtacaggtcttcccctgaccagggctgcggctgtctcggcacacgccttggacggaaaacaggatgtctccgtgattgtgtaggagatggaggttataagctctctgtccgctgagaaatagtaggtcagcacatccctgcaggaggggtcctggcaggcccctgtccccatgcatgtttggggctttcccctgtactcacccttaagggctgtttctgttatgtattctttattcatccttcccgctccagtccagtgaacgccgtaccagtgtttcggcaacatcaatcttgtaagcgttgcctgaaaggggaagcgccccctccagtgccagcttagcggcacccagtgccgtctccccggaaggtttccttccaatcagatacgcttccgcctttttccttctcatgggaacaggtgcaacagcgcccagcgtcatcctggcatctgtaatcacaccgccatccagcacatacctgtatgccagggccaccactgcgaaatcaatggatttgcgcagcctgaatttctcgtatcctgatatggtgcctgctgcgtcccatggaatctgtatctccaggataagctcccccttaagcagggtgtcggaaatacgtgtatgggaggtcagaagctcctgcgcccccagagtccgcaggtttgtgcggataactgcatccgatgccagaagcgcggttgccatgtcgctgggattcacggccagacagccgcagttcatgcaccgtcccgcctcgctgttcaacatgttgtacgagtatcccttgcggtcttcccggttcaccccacgctctccggccggcagcaggtccggctcattggagcagctgatgttcccgcactccggaaggaaacctgccagcccctggcggcattcacctgtctcaacagaaagtggcgctccctccatatggcggttcatcatgacagccgcctcacggccgccggccagtgcccttacaaccgtggccggtcctgtggtcacatcgccggcggcaaatattccctcctggctggtgctgtggtcctcactggcctttattcttccccggtccgtctcaaccctgcatacactgtccaggaagctcaggtcagatcgctgtcccactgccataaacaccacatccgccttttcttccatctgtctggcttcatcgtatacaggtgcaaagcgtccttccccgtccagtgtggagacacacgccttaaaccggacgcctgttatcctgtcctcctccggcgatacggattccttaaggatttccatggggccccagccgttcttaatctcaatcccctcctccaggacccgttctatctcctccctgcccgccggcatctgttccctggattccaggcagatcatggtgacctttggcacacccaggcgctttgccgtgacagccacgtccacagccacattgcctccgcctaccaccacaacctctgaaccgggccgctcatggatatagctgtttacctccaccaggaaatccaggccgaaccgtgtcagctcctcacctgaaattccgattaacggacgcttccatgcaccggtatccagcagcacactgtcattttcactgcgtatggtctccagctcaatatcctctcccacctttgtgttaaacacaaaatggactcccatgccttccagaacggatacaaacttctgcacgatttcctttggcaggcggtaggccgggatggcataggccagacatccgccggcctccttcatgcgctcgtacacagtgaccccataaccgctctctctcagataataggctgctgccagtccggcgggaccggatccgacaatggcggccctctttccattttcctgttttggcgccttcatgaaccgctcatggtgttccagaatataatcccccacatagcgctccaccgcgcctacattgacacgctcatcgtactgctccctgttgcatttttcctgacagaaatgggcgcatacccggctggtgatggccggcatgggattggctctcaggatgatgcgggccgcctcgtccacatctccttccctcagcttttccatataggcggagatgtccgtatgggccggacacccctgtgtgcacggagtcatgcacaccttggctgccccaaagatggaatggtaccggttctcccccatcatggcggagcagagatatccctcttttctggcacagttcacccgtccgcccaggctgtccggataccggtagtaccagcaccgcacatcctgacacaggttgccgcctatggttgcggtgtttctcaggttgggggatgccacgctttcggctgcttgggcaatcatgggattcttctcctttacaagggcggaacgtgcaatggtattcagtgtggtcattgcccctatgagcaggctgccatgctcctcccgtatatagtccaggccttctatccccttaaggctgaccacccgttttgggtattccggcagaattcggtttctcataaggtcaatcaggtctgtcccgccggcgcaggcagccgtatgctccccctttaacagctcactggcaagggtaacggttgacggttttatatattcaaaatttttcattatgccctgtcctccttttcctttaacgctgcaagtacttttgcaggcaggtatgggtattcctccagttcaatgccgcaggcattatagacagccatggtgatggccggcccggacggcgatatgatgggttccccgattcccattgccccaaaggggaagtcactttcccgcccctttgtggactccaggcacacatggtcatgaggcggcgcctcgttgaaggttctggccttgtactcaatcaggttggggttgagcaccttattgtcccatttatcccagaccgtctcctcccggatggccacgtccagccccgcgaagaaggaggtcatctggttataggcagcccttgggttcatgatggtccctgcgtccgatccgccaaaatggtcggttatctctatcagccctgtctctgtatccactgccacctcaacgaactgtacatgcatgatggtggcattgtcgatgccgggccagtgtccggttccgcttaagctgtccggatatatgagaatttcatgaaggtcgtgtacctcctccggatttgacaggcgcttaagcataccgtccttaaagtcccagtcggatgccggtattcccagccgttcctctgccagttggaacaggtttttctttaaatccctggctgccctctgggcggagatgccgccggagtaggtgcttctggaggcaatgcttccaaaatccagaggtgctgcgctggtgtccgaaatacttacccgcacccggtccaccggtatgcaaagttcctctgccacgatcttgcggtatacgtcccggaccccgctgccgaattccgtcataacggtctgaatcatgactccccctgcgctggtcatggtcacattggtattggaggccatgccgccgatatccgagtgtcctgacagtcccatgcccacgccgtaccgcctgcttccgtcagctctgctgggaatgccccatcccttgaaacggtccttccatctgaatccctctgccgcagcatggatggtgtccttccagtcaggggatgcattgtactgccacggttccttctggttcaatgcattgtaataccgctccccgtgacgcagcacattcttctcataatacaccaccgggtcaagccccaggccgatgcacgccctcatgattgcccggtttaccagggcagaggattccatgtatccgtatcccctaaaggatccggagggaaccttgttggtcactaccacagtacccttgtaccgcttgttatccgtcttgcacagaaggggcagactggccgtgcccacagatagcatgttttcctgggtggatgcacagacacctgcatccgcatactgggtcatctcaatggcggttgccagtccttcccggttcaccccaagcctgacatgggatttggtgcacatgcgcgtctggtggcatgcaaaatgttcttcttttgtataagaaaacatcacaggccgtccggatgcctttgccatgatggcggtcagcaccggcggaaccacattgcccacaaacagcttggaaccaaagcttccccccacgcagggagccacgatgcgcaccctctcatagggaatgtccagggacgcagccacataagtctggcagttggacggtgccgcgatggatccgtagatggtcagcatatcatcattccactgtgcaatacacacaggtgcttctgccggcatggcgttctggccgcttttaatctccccgtccatttccacaatgatatccgcccgggcaaatcctgcttccggatcacccaccttaaaatccaggtcatccagtcccggaaagatagggggcgctatattgcccggaaacacgtcatagagctggggcgcgtccggcgccagcgcttcatcaatggtgaataccggaggcagttcctcatactccacttcaatcagttccatggcatccaatgcaatatcctctgtgtccgccaccaccagggccaccgggtcccccacaaaccggactgtttcattcaacggccggtagtggggcgccggagtcatttggtttgtaatatagatgttgtccggtatgtccttgtatgtaaccacagcatggaccccgtcacaagcctttgccctgtccacatcaatcctggtaatacgcgcatgggggtaagggcttctgagcaccttgccgtaaaccattcctgtcacccgcaggtcatccgtaaacacagccttcccggtgacaatgtcatctgctatgatacgcttgatttccctgccaactaccttgtaatcctggttcattcttcactcctccttttctccacataagccatgatgctctccactgccgtgtaatgggtcccgcagcggcagtaattgccggccagcgcatcccggacctcctcctcagtggggcagggcttctcatctaacagggccctggctgtcataataatgcccgatgtgcagaatccgcactggaatccgcaattgtccacaaaagcctgctgcagcccggttaagtcccctgtctccgggtccgccagcccttcaatggtggtgatgctgcttccgtcacagtccatggtaagcaccatgcaggaagtaaccgcacggccatccatgattaccgtacagcagccgcaggccccctgcccgcatcccagtttcaggcccataagatgaagccggtccctcagtgtgtgggccagggtttcagactggggcatatcccccctgttgtttcccacgggtatctcatattccctgcggttcaccgtaagcgtgataaattgttgaagcttttctttcatagctgcctcctttatttttatgtgtttcttttggtataccatttattttgaatttttatcgttttttctcgattattttttaaaatatgcactatatttattttacattattatataatatagttatttttaataatttatggtataccaaaatactatcatccctttcagcaaatgtcaattgtacactcctctgtttcgatatactactttaaatataacgaatacagtatacggcagtccggcctatgaaccgtatttaacagttcttcctgatttatgccgggttactgtcataggcatctttcacaaacagttgttaaacaaaattatttattatttttccatttcgtctaacatttcataaataaaaattgagattttctggcttttatattataataaaagaaatgcgaatgcagacaaccgctgtctgcatatgacaaaggaggaaacaatcatgggtttgtttcagcataaaaaagaaaaagggacagcagagcttccgcctacaccgcctgtccttacccccactgaaccggatgctgccagcgagggccgcgcagcctgcatgaacaggctggagtccgtactgggcgccccttcgtccaagggagtggttctaaaactctatctggagaattttaagagtctgaataagacgttcggatatgattactgtgaggagcttctttcccagataaaaagctatctgaaggaagtggctgagggcaatatctaccgttacataggtgtggaattcatcattatattggaacagctttcagaagggaaggcctgcgacctggctgatgagattctggaacgcttcggaaacgtttggaaaatccgcggcgtggactgtctgtgttccgcacagataggtctctgctcctaccccggtcatgccaccagcacagatgagctgcttaagcgcctggacctggccgtgtctgctgcctctgactgcggacccaaccagatggcagtatatgacagcaacatgcatacccagttcgtccgccgccaggccgttgccatgtaccttcagacagccctggaaaagaatgagctggaggtccgctaccgtcccacctataacctgaaggaaggccgctttacaagggctgattcctatatgagaatattcattcagggcatcgggctggtgggcgcagctgagtttatgcccatagccgaggattcaggccagatcagggccattggctactacgccctggaccatgccggcagatgcatcagcgaactgatgaatacgggaagggaatttgactccatctgtatccctgtttccccagtgcttcttgtacaggaggattttctggatcaggtcacaaaagtccttgagacctaccagatacccaagggcaagctggccctggaggtggatgacagcgccctgtccaatgtatatctgaacgtaaacatcaccatgcaggagctctccgacatgggtgtggagctggtactcaacaacttcggttccggatgcgctcctgtcagcagtatcctggaccttcccatcaatacagtaaagctggagcgcatgtttgtatggcagctggagaccaatccaaaatcagcctccattgcaggcggactgattcagattgccagggaactgggtatccatatcatcgctgagggtgtggagacagagaatcagctgaacgcactgaacaactatcagtgcgagtatcagcagggcttctactacgctcccaccatggagcaggacgtgctcataaaggtcatgggaactacgctggatgagtccagggttaccattgaggaagagaagcttaaaatgaagatgtaacaataatccttgcaggaaataaatgcaggaaataaatgcaagaaaacgcaggttccgttttaacggttcctgcgttttgcgttgttattgttatcattatcagatattgtattacggcttccactgggcataaatggattcattgattcctgaatgtatggtcagctcactgtgtccatcctttaccagcttaaccctcctgttgccatacaggaagcagcgctcctgcactatctggttcatattggcaaacaactcctcatagatatccgtaatttctccacctatgtaaatgtattcagggtccatcatggtaatcagaacagaaatcaatctgcccaaatatccggcggtctcgtgaatcagatgaacggccttttcatcctctttctttgcgtctgcaaccagctgattccaggcccccaggacatcctcctgttcctctccccaatattccgccacgatatcaggaatggcaagttcattctcaatacatccatacgccccgcattcagaacagtatttacggggatttcccagcggcgtatgggccacctcaccgccatacccgtgatgcccccttaacagggaaccttcgcatataattccgacgcccactccctcagagatatggaggtagacaagatttctgcactccgcaatggtatgcttaaggcttaaggcacagagattggcctcattatcaacatagcccggaagctggaaggctttctctacaatggctttgagaggtacgccctcatacatctttaccgcacagtttacaagtgtctgagtagccaaatcaaagattcctgaaacagccacccccacaccgatgtacacgtgattggagttttcccttgcaatctcatcaaatcttttcctggcgtagtcaataacctcctcaggggcgtccaaaccagatatatcatatttttgatggaacacaatctcatttctgatattcagcaccgcaattcccagcacacctttcatctgcaggttcagacacaccgtacagaacctgttatatgccagattaactgtggatggagtccttcctaccgacatggagttttttttaacgatttcaacaattcccctctccaataactcattgcacagattggaaaccgtggcaaagctcaatgctgttctgtcagctatatcacgctttgtaagaccgctctcccctgctgaaaacctcagcacattcacaatactcttaacattgtgctgtttaatatccattacgtccaaagattccatcgttttctccatctatcctcttaatttactgctggaggattctgatattttgccaatacggcctcgtcctttaacatctcacctgtcagcaatgagctgcctccgtagatgataggaggaacatgtccaaatggcggatttgctgatgggatttctgtgggatgtgccgctgcatatgccagcatcatcgcctcatacccaatcagatatgggtcatccacgattgtcccttcaatatccccagcctgcagcagttcaatgaccgctgaactgtaatcacttccaattataacaatattttctaaaatattcaatgttctagctgccgctgccgctcctggcgccccatatccatgggtactgaatattcccttaatctgagggttggcctgaaacagagccgcgcatacggtttccgactttgcaacgtctccctcatcgtttaattcggatacaacctgaacccccggcgcattctcagccagccattccttaaaacctgctgccctctcttcctgggcaatggagcccggaaccagacatatggcgacctgtccctctcctccaatcatctcagacatggcttttgctgcattggctccaaaatcatagttatctgtgcccacataggacagcctgccgctgtcagcagcatcactgtcaaaaccaatcacaggaactccggcacttagtgcttttcctatggccgaattcaaggttgtctcatctgccgcggataccagtattcctgctggtttcttggccgtcacctgttccactgcccttgcttccagcgacgcatcccactctgcaggtccctgaagctccactgttatatgacttccaagcagctttgccgcatccttcatacctgcgtagcaccagttgaaatattccgctccctttgtaaagaccaccatggagtacagttcattttccctggcagcagatgaatcctgtccggccggcgccgctgcctttgatgtttcgctgctgcatcccgctacacttgccagcataattccagccatacacaatgcgattattttcttcatgtaattctcctccttttatgaatgcctcttttttaatatgttcatcccctcgctcatcagcactgccgcaatcagaaacgctcccgtcaccacatcctgataatacgtggaaatcccgctcatgacaaatgcattgtaaatcatggccatgaacagtgtccccagcaaggttcctgtaaccgatccatatcctccgtgggtcaggcttgtcccgcctattgccactgttgtgattactctcaggtccgcattggtgccatagctgtagcttgcgctgctgtaggtcatggctgtcaggattccggctgccgctgccagaacagcagatatgatgtatacattccggtataccccttccacctttattccggacagacgggccgcttcttcatttccgcccacaaaatatatctgctggaatgattttttgtttttagaaaagtaaataaaaacagctgccagcaggatgtacacaatccagctcaaaggcattcctgctatcctgcgtgtactccaggctgaaaatccttctgaaaaattagaaatcgcgcttccgccggtaagtgtcagattcagtccctttaaaactgccgcaatggccattgtcactaccatgggatgcagattcagcttttttctaaaaaggtttgtcaggcaaccaatccccgctgccgctgccagaaccagcattatagctgccgcaaatggaactccccgtatcatgaacagcgcaagaacgatagaagaaaagggaaggacacctgccacagtcagatcaattcccccggatataattaccagggtcatccccaaagccatgattgcctccatgatgaaattatccaccagtacacaaagattggctgctgtaaagaaataaggcgaacgaaaccccatgaaaaccgcaagaagtacgataaggaaaatcagtaccatataatgaaggttgatttttttagccatttccttccacctcctcccggaacgccgccttcatcacaatctcttctgtcagattgtcattctccaatacggcctggcatttgccctcatgcattacaatgactttatccgatactcccaggatttccggcagttcagaagaaatcatccacacagccatcccgctgtctgccagccttcgcagtatttcatgaatcattgccttagcgcccacatccacgcctctggtaggttcatccacaatcagcagctttggattggcagcaagccattttgcaaagagtaccttctgctgattaccccctgacagattggataatctgttttccatacactgtgtaggatgtatttccagttcttcaatatacgtttttgttatacttctgctcttatcctcctttatgaattgtataggactgcatatggatttaagacaggctgcaatcgtgttttcccgtacagtcatgtcaacaaatagtccgattgccttgcggtcctctgacaggtaacacacgcccgctttgattgcctgagccggattggaaaaccttacttccttatcctcaaaaaacacctttcctgaatcaatcttgtccgccccgaaaatcgaaaacgcacattctgtccgtcctgccccaaccaacccaaacattccggcaatttcaccatatcggatatcaaaggaaacatgttcaaatttatcctttctgctgatactctctgccctgagagcacattttccgtttctgtcctttgctttcggaggatatagattatcaatattgcgtcctaccatcatcctgattatggtctgtacatccatgttttcccttgtcagagtccctgtgcatgtcccgtccctcagtaccgataccttatcggaaatccttgtaatttcatttaatttgtgacttatgaaaataatcagctttcctttttccctcaagtcaaataacagacggaacaggttctcgatttctttgtcagaaagagcgctggtaggttcatccaaaatcagtatgttaacgtcctttgacaataccttcgtaatttctatcatctgctgcaggccgacgctcaaggttccggcctgaacccttggattgatgttagcaccgattttccggaactcttcctctgtatttttatagagacggtcccaatctataacccccagcctgttgacaggttcattattgacaaatacattctgggccacagtcatattccctgcaatgcttaattcctgatgtacgattcctattccatgggcataagcctccaccggattcctcatggttatgttccgtccgtccaggagtacttctccactgtcagcctggtatatacctccgattattttcatcagggtcgattttcctgctccgttctcaccgataatagagtgaatctcccctttttcaaaatcaatggagatattttccagtactttgttatttccaaaagactttactacattttttacttgtaaataactcatacccttctcctatctcggttttcttcttcggcgcagggcatcaaaagccaccgccgccagaagcataaggccgcttattgcagatgaccagttaggcgaaccgttaaacatgataaatacgttatttaccagggccactaatatgactccgagagcagttcccagaaagcttcccgccccgccatgcatatcagcgccgcctataactgccgcagaaatcgccttcatctcaaaggaaatgccataacctgcatggcccatacccaggctgctggtcatcagtatcgcagcaattcctgccatgaggccgctaatcatgtagcccaggataatcgtaagtccagacggaatacctgaaataaatgccgcctgcctgttgcctcccacgtaaaacatgctgcgcaggggtctgaaacgtcttgataaaagggccagcaaaagcataatggtgattgataccaatatcttattaggtactccaagcagacttcctctccctatattggtataggcgtcagtcaaccctgccacgaaataaccgctggtcagcacataacaggctccccggcaaatagactgacttccaagagtcgccacaaagggagctacattggctttggacacaagaataccattaaccgcacctatcgcacccccaaaaagaatgcccaggcctactgcaagcactatgtttatacctttttgaatcattaaggtacagatgattccagacagcgcaaggactgctcccacagacaggtccaccccgcccaatataatgacaaaggtcattccgcaggccagcagcaaatcataggcaagattggaaaatatggcttcaatgttgcttctggcatagaaaagttctcctttaagaatacacattgcaacaaaaataactgcaattgtaatgattaacgttccttccctgttattgacagacagtttcattttgtctttcattcacatcacatccctctgcctaccagctcctgaacatccaccggcatatcagaacacttgacagcagttcttccccgctttatatatgcgtcctcaacacagcctccggcaatctcggtatttggataaccgtaacatccaagatccagcataatacctacgttctcaccatacggttcttccttgtccggggtgatgaccattggttccaaacactccgtcagtccggttccatgacatgtactataaaaatgaaactgcttcatattacgccctccgatttcctgtgaggcaaaataattcctggccgccaggtcaatgcggttggaaggaagattcccctggcaaacatgatagatttcctgttccgcccttcggtaagcttcattcatgcagtcaaaatatgctttctgaagttcgcttctctttcccataacaaaagaccttctgcatacgcccttataaccctcaaagctgggactgcagccaatctgcacgatttctccttcctctatcactttgtttgaggctggtccaatcacggttttgcaccggtcacctgaatttacaattgtatcaaacccaaatccggttcccccaagggatttgactgtaaagtctcctactgccgccacttcgctttccctgattcccggcctgacaactgccagcatggctcttactgctgcgcaggcaatgatatctgcctgttccatacacttaaactcattctctgatttttcataccggaggtcagacaggatatcggaagcatccaccacttccacttttccaaaactcgtatggaggaattccatgaattttgccggaatgatatcatcacttgtcatataaccgattcgtttgatttcgtgtcctatgtaacgggcaatgacttcattcagctcatccctgtccactccttcataatattcatcgggtatgctgaattcgtttacaaaacgggtgtccaatcccaatccggattcttttgaaaggataccggattcaggtccggccagaagaagaggacgttttccgggagcaatcaccccgctggctctttcgatggttgggttatatccagtcagataaataccatcccccggcatctctctgtaccagaagaaaaatcccatatcaatttttttctcatccagcttcttccatacattctgataccgctcctcatattctttctgcggaatcttaaaatccttatcaatgcgtccctcatacgccctcacgattcccataaccctctcaaaatccattgcgctaatacccataactacctccttcatttatttgtgcattttttatattaaactaattattataatacttattataattattatataaatatttgtcaatactgcggggggattagaacatgatttccgtaatttttcataaatcccggcggaaaacagcaaaaaataaaaaagcctgcttggattttttccaaaacagaccttttcctgttatttttctacctctccatcggataaaccaacccccactgtctgcgaagctcatccatccaccccatcatgcgcagggtttcctcatgaggcatttccgggcactccaaagctccctctttgatcgcctgcaggcacgcctccacctcgtactcatacccgctgatctgcttaggtgtatcgtaggaggcaatcatgttcctggagcggtcatagacccggattccctcacagttgttgatgttctccacctcaataaatccattgtcaccgtagatgatgccccggcggtcgctgagtcccattgcgctgctgcacaatgccgccatctttccatccttataggtaatggtgatgctgttctgagcatccactccggtctctgtcatcaccgcggtaccggtaatggagtccacctcatccccgaacaccatggacgcaaaattgagcggatagattcccacatccaaaagggctcctcctgccagctcagggcgcatgatgcgctctttgccgctgataatatagcccagattggctgtgagcatatagggccgtcctatgacgccgcttgacagcacgctgtccagggttttcctcatgggcatataccgggtccagatggcctctgtcagaagcagctttttttctctggccagcgcaagcacttccctggcctgggattcattgactgtaaaggacttttcacacagcacatgctttccgtggttcaggcataatttaatgtgctcatagtggtgtgaatgaggtgtggcaatgtatactagctccaccccggcatcctccaccagttcctcgtaagatccataggctttttcaaaaccatacgtttgcgcaaattcagctgcccttccataatccctggcagccaccgcgtaattttgcgcgcagtccatctctctaatggtccctgccatggttcccgcaattgacccggctccaattatacctaccttcatcttagtaaccctcctttaatgcttttttattcttctattgtttctctgttattccattttgttccaattctttctctgagcttccggtaactacatggacatgcctgtatggtatggagatacccacggcatcaaaattcttcttaatgaggcggcgtatatcgctacaggcagtaaaattgtcgtcaatgttcttggtccataccgtggatttaaggatgattccgtcatctcccagttccttaaccgccacattgaccttattaccctccgacggatccgggcggatgtcaactaccagcggataagaggcaatggtctcccgcatcacctcgattgcctgttccagattgctttcatagctgacggagacttccatgtaattgcctatataatcattgttatagttgctgttttccacaattgccttattgatgacgctgttgggaataatcatgcggctgttatggtaggtccggattacggtatggcgcaccgtcatatcctccacgattccagaaatgcccagactgcttatgttcaccttctctcccagattaaagggacgggaccagctgagcatgacgccgcttatgacgtccgccagaacctgctgggcagcaaaacccacgatggctactaaaagcgaggagctggtaagcaaagtagcgctcagcgccttagtggtattaaaaagtccgctgatgcagataaaggctatgattgtcagcacgaccttggacatactccgtaggaatttaatatgaatctgttccttccgcttcagaatcatcccgaatatcttattaagcgcaaacattcccccgctccagaatactacaatcaccgctatcttaatcaataaaatctgcattcaaatatatcctttcatatttatgtcgttcctattatgctgttctattatgctgttcttttatccagttcctttaagtatcagtcatgttatgtacgcaggctgcattagtagtctaccataccggcccccttcttgcaatctccatattcagaccagctcccatgtctgctccgtgcctgctcccgtgtctgcatcctttatccgcagcctttatcccccgtccctatacgtattcctcctatcatcagaactccctgattaccagctccgtaattccctgattgtctcccatctcaattcgttttaccgccggctcccttccgtaaccgtattcctcacggagcatgctccgaatccgcgtgccgccgttatatccgtgtatgacacgaatccggtaaatgctttttcccgcagaatgtatctgcatattgattgcctttttcgcttcctctgtgttttttccgtgtacgtctatctctatgattccgcccgtcatctgtccatcattcctcacttcttttgttgtcaaacatactgtccgtatgataatacatcacgccataaattttaaatcaaacacgatggcccttgccagctcctcaggcaccgcctcagcctccttcgccaatacctgcttaatgaaagcagcctgcttcctgtccacccttgcatagggacttctgatttgcagcgcacccagcaatttatccctgtattccttcagagactcatccttcagcaggaaaatcagatagggcaggcggtcccaggaattctcctgtatgagaaggagtatcaggtatcttctgatgtgacagacagaatccggggactttcccgcagtctcgtctgatttcctccatttttcctgctccccgtaaagcagagctgcgccgggatgtatcccgtttttccggatgcactgataagcggccttggatatacagggcctggtatcaaggagatacttccagtaaatttcttccccttctgcccccatcagcatacccacggcttccagagcgcccctgaccaccttttcagattcgtgctccagatacggaagaacaaggtccgccaatccatgcctgtcatccagcgcccttccctgttccccgattcccaaaatagccggcaccgggacaggctccttcagatgcttctcatagaatgccaggatatccaattggctgtgctttttaagtatgtaggccgccagatcccgtatgccgcagttgacatccagcagcaaatcttccacacccggccaggcacatttcagaacatgatatttatactccatggcctttctcctgacaaaagagctgcggtgcagcaaataacagtcagccatttctatggagcacgggtaatatgtaagcagccctgtccatatgacggactggcagtagctgtgtttttcctggttgagaaatagttctgccgtctcctggtccagccttctgccgctgaacaggaagcggtatatgctctttctcacctcataatccatggacagaacggatggcactgacagggaacccgcctcctggtccagccgttctgacatgactgttccgatgtgttccacggtccggccgtcctttctcccggaacgctttaccttatccagggccatcatggccgcaaacaattcatccaggggacatgtctccaggcgtttggctgctgcccgtgcagcagccaaacgcacttcgcccacccagtcattgaggcggagcacaagaaaggggagcgcgccaggataaccagccatctcctccagacaggcctggcggtaatagccattgggatggaagctgcccagggccaatatccaaaagtaatccctatctgaccggaaccagtctttcttctgccttatatccacttttttccagtcaatatcccattccatagaggtatactgccggaaatgttcgctgagccgtatcacctgcctcatggtcataccctccatgaccatccctatggcccttcccccgcttcgtatcaactcccggtcctctgttgccaccgcacagtacacctgggaaagaccggaaatgtccattgcttccagtccggatatggcccgggacatcctggcatggtatgcccttttcaaccgttccttctcaacttttgtccaaagcatgaaaaacctcccttctgcccggcaaaaacttccgtttctgcactgtgcctggctacagaacctccatctcctgggccttttccagccattccatacaggccctgtgccattcctcccaggcctgttccagacgcaggcaccggtcctcatattcattcatccgctcccaggcacctccgttccaatactcctctgagccatgccacatggcccgcagttccctcacctgctccgtcagatattccactgcattcccggcaggttccagatgttgggcggccaggcccatgttccattcccggtacgcctcatcctccggtatttcccttaaccggtggcgttccgctttgggcacggcgcgcatacctgctatcagcgcctgctcctcggccctgatctgtgctgccatggaaccgccctggttctccctggccttgcgctccagatagtgctcatatccaaagggataatacattacggtttgattttcaaatatcattaccgcatctgccacctgccggatcaaatatctgtcatgggacacaaacagaatcgtccctttataggcccggaacgcggattccagtgtttcctttgcctggatatccatatggttggttggctcgtccagaaccagaaaattgggacggctctgtaaaagctcagccagcaccagccttgccttttctccgccggacagagaactgaccttcttctgagcgtcccttcccccgaacagatatgcgccaaggatacttctggcctccttctctgtcagtgcagggaattgggccgtaaaatgctccagcacggtctgctccgactggatggccccgctgtgctggtcaaaataaccaatggtggtctgatttccaagggaatagctcccttccagagagggcaggaaaccggcaatggtctttaaaaatgtggtcttacccgctccgtttggtcccagtagcgcaatcttctgtccgcgccgtatgcgcatggtgatttcaagcagcggcttttcatatccgattttcaggtgctctgaagtgaacacccacttgctgccgggcagcagaggattaatctcacctgtaaagatatgagcatcatcctcctgaggtttttccacacgctccatatgctccattgtcttccgctttgccctggcaaatgcagccttatttggtttgtgtttaaaccgttccaccagattttccaaacgggccagctcctcctgctggcgctcatatgccttcttctgaagccgaatctgtttcagcttttcttccctgtaatgggtataattgcccggataccgcctcagtccttttcctgtcagctcatacacaacatccgcggtctggtccagaaaaaaacggtcatgggataccattaccaccgcgtttttataatgtttcatatactgttccagccatccggctgtctccatatccagatggttggtaggctcgtccaaaagcagtatatccggcttttcaagaagcaggcggattaaagctatcttggtctgttcccctccggaaaactggcttatccgctttttcttatcctccttcggaaatccgaaaccagtaaaaagcgtgtcgtactcacgctcatattcaaagcgttccctttcaaaggtatcccggcaggggcatgcctccagaagctcctcctccacggtccggttcccgtccttaaaggcctgctgggaaagcatcccaacggtgagccggcgcgaacaccgtatccccgccccttcgcgtctgtcatcccggtccagagaaagcttccctgccacaagatttaacagagtggttttgcctgctccgttcttacccaccactgctatcttttcattgccgcgaatctcaaaatcaatgtgggataaaatcagctcgccgcccactgatacggtcccgtttgaaatctggtataacatgactgtgtcctctgtctgtgataatatagttaaatctttctggtgatgtgattatcctgccattttctctggctgttatctgtattatatcatgacgcgcctgattgtagtaataaatactttttcttcctttcccggactgcgttttgcggattttaccatatagacccggaaaccaggataatgttgccatgagtcaaaaaagagaggtcaggcaagccctcctctctctgtccgtcataccagctggttatttctttttatctctgtcattaaatgatttaagcaccatctgcgccggataacaataggcataaatacagctcttcataagctcctgctcctgctggttcttacatacgctgagaatcatctctttctcatccgcctgcaggtatgcttctgcgctgttgcctccgatttcccgtatctccttataaatccgatatttcttgtaataatccaaaccgccgaaatactttgccttaaccggctcaggtacaatattcagtttatacttgtcagacatccttgccagtatattatgtatcttctcacagttttccctggtattgttcaaatcaggcatgcagtacaaatagtccatatggaaccccttcttctgtaaacaaattctgatgatattatgacagatttttcctttgtatgcaaggggttttttaagccgtgtcaaggagcatcggcataaccggcttttggttccggttttttccggagcctggcggtaatggtgtgttttattgtccggccgctttgggcttgtccaaaacgcctgcaaaccaggattaccctaacgatatttttcgtaaccgcactgttcttttacttctttgcctaaaagcgtaattgccttttcaggacaacggctgatacaccggtagcacattgtacaccttttacccgcagctgcttttccgtttttcattgaaatattttccattgggcataaggaaacacaaagcccgcagccaatgcagcttttactgattttcagcttatccgtgtaatctgctgtttttccgtaaaaccaaagacgctgccccaaaagaccggccaaatgggaaatgaacgttatgccgtcttttggatatatcccctgttttataagcagcgcggcagattctatctttttatcagccagaataatgatttctctgttttgtttcagtgtctttttcagaagcttactgtcgcatactgagtccggcatacggatatgaagtccgcccagaataactgcaccatattttttgagtaatcttgcggtacagccagcgccgtcaccgctgaacgcacccattgttgaaacacataacagcttttttcccttccacagaccggcatttctgtgtataaaatccctgaccatataaggtgcgtttgaaaactgcgtaggatatcccagtataatcgtatcattatttcgtattgcctcaacggtcccccggctttctaaaggcatggattctgcggaggaatccagtagtcctgttaatttttcaacacaatgcctggtgtttcccgtaccgctcagatatattccgatcaattctatccacctcgtaatgttcgatttcacattctgctttctatcatttggccgttcattatatcagggattatgccatcccgctttcaccggtaaattataccatattagggtccctccggcaaccggcatatcaaaacagaaaaagttgtggaaaacagggcgccatgttataattttatacacattctacctctgatgtaccataaaatacctgagcaggaaggattaaagatatgcttacctttacggatgcctccggggaaatcctttatacatcacattataaaataattgacaatatgattgaagaagcgatcccctttaaatatctggtcacaaaggaacagcgctgggctccggcaaagcagatagtttaaatcgtcggtttgatttttctggtactcattttgctggcggttgtaatggtttttgttttaataagtacccttggctaaacatggttcttatttaatcgggtgcctgataaccgttttccatttctctggcgcagtctttcttgcatctgtcatatatatctcatgatgaagccgtttactgttcatatcatttacataaccgttttcctgtatgaatttatccataacggccacagatgcaggctcgtcatcaaatgcacccaagtgcatcatctgaacgcacagcccctcctcaatggttaaaaattctgctgatgaacattctaactttttctttttttccgctgtctcttttgcccaatcaagatcctttttcgttacaaagtccggcaaccgaatagcggaaatccactgaaaggaagacttatccgaatagtccaccccttccacattatcctgccaccaaaatccttcaaggggcggaacaacatattcaaaaaatccttccattttataatctgtcttataactcattttcaaagtataggccactgcatataaaatccccagcgcctgctgatatgcaccgccctcttcatttggatttcctttaccccggacagctatataatttaccggcggtacagttatgatttcaggtttatgtttgggcatataaaactctttatattctttcttaaaatcaaaagccatggctcagtttcctttctttaaaataaatactggttttacaaacagttccaatctatgtctcctcccatacaggtgccgtatcctcatacaattactctcagtataacaaaaaagccgtttgaaggaaagcattgtatttaagttaaaagccgggccgctccccctctcttgttgattttattcagctcaccgtatacaattagagaagcggtgtttgaaagggaatacgattacgatgttaagatacaacagctgattggctgctggaccttaagggaaaggaaccgataacagatgaaaagactttttttgctggaagatgatttgagtttaatcagcgggctttcctttgctgtaaaaaagcagggatatgaaatagatgctgcccgtactatactggaagctgacacattatgggcaaatggatcctatgatttggctattctggatgtaagtctccccgatggttccggttttgatttttgcaggaagattcgccgtatgtcaaaagtacctgtcatgtttcttactgctgccgacgaagaaacagatattatcatggggcttgatatggggggcgatgattatattacaaagccctttaagctggctgtatttttatcaagaattaacgcacttcttcgcaggagcgaaaattttaatacagctgctgcagaaatcagctccaacggcattcatattcagcttctgaaaggaacggtatataaaaacggaaaacggctcgacctgacagccagtgaatataaattgttatgcctgttcatggagcatcctgaccagatactttccccggaccagatactaagcaaattatgggattgcagcgaacaatatatagataacagctcccttacggtgtacatccgcaggctccgaacaaaaatcgaggacaaccccggagcaccggaaaggataatcacggtccgcggcatggggtataaatggaatacagcagactgaggtgttatgatgaaactatttgccaaccgaagaatcaaatttctttttgccggtattttgtggtccatcttagcttttacattgatttcagcgctgttagcaggctttgaggtcaggaatgcgtcgtattgcatcctatttagcagcctgtgtatgggggctataatattaatgctctgtttccggtatttcagagagcagcatacaatcatggaaaacgccatatcacagataaaggaatctatttccggcaacaaagatgttaccattgagtgtaatgacgagggcgaactatacagactgttccatgaagtaaactctttggtctctatcttgaatgcccatgccataaatgaaacaaactcaaaaaaatttttgcaaaataccatatcagatatttcacaccaactaaagacaccccttgccgccctgaatatttacaacggcattatacaggacgaaggaaaaaattctccggttattcaggaattcagcctgctttccgagcaggagctggaccgcatagaaacactggtgcagaatcttttgaaaatcacaaagctggacgcaggtacgattatattagagaagtctttagaacatgtgtccgaactcgcagaaaacgtaaaacaacatttcctgtttcgcgcccaaagggagggaaaagaaatctgcttatccggcagtggggaaattacacttttatgtgaccgtacctggatcatcgaagctgtcagcaatcttgtcaaaaatgcccttgaccacactgaaaaaggcagttttgtccgtatcgaatggcaggcgtttgcttctgttgtccagattaccataaaggacaatggatgcggcattcatcccgaagatttgcaccatattttcaaacggttttatcggagccggttttccaaggatacacaaggaatcggtcttggtctgccgttagcaaaagcgattgtggaagcccataacggtacgattgaagcagacagcacattaggcatcggcacctccatcacaataaattttctaattccttccaaattctaattcctacaaaattgtaggcttacagtcatattggcgtaggattgctctgttatattgggattatcaaaacagaaagaggcgtttataccatgaatttattagaaatcaaccatatctgcaaaacctacggaaacggtgacgctgctgtgcatgcactcaggaatgtcagtttttccgttcccaaaggcgagcatgtggctatcgtcggagaatccggatccggcaaaagcacgcttctcaatatgataggcgctctcgatacacccacatccggcaaagtaatgatttgcggcaacgatatcttttccatgagcgaccgcaaacgtaccatattccgacgaagaaatataggtttcatctttcaggccttcaaccttataccggaactgaccgttgagcagaatattatctttccggtgctgcttgattaccagaaacctgacaggcagtatttagaagaactgcttacaatactcaatctgaaagaacgccgcaatcacttgcccagccagttatccggcgggcagcagcagcgcgctgcaatcggacgcgcccttattacgcgtccggcgttaattctggctgacgagccaaccggaaatctcgacacacaaaacagcagcgaagtaatcgcgctcctgaaagaagcgtcaaaaaaatatgaacagaccattattatgattactcatagccgcagtatttcgcaaaccgcggacagggtattgcaggtatcagacggagtccttactgattttgggaggtgccgccaatgaaaagctatctaagccttatccctatctccgcaaaggtcagaaaacggcaaaacagcatgacacttttatgcattgtatttgctgtctttttggttacagctgttttcagcatggctgatatgggtgtcaaaatggagcagtcccgattgctggagaagcatggaaacctgacccttcaggacctgctaactaatacaatgacccaaaccctttttctgacagcaggtgtattgttcgtgctgatattgacagcggccgtattgatgatttccagcagtatgaacagcaatataacccagagaacaaagtttttcggaatgatgcgctgtcttggtatgagccgtcagcaaataatccgttttgtgagactggaagccctgaactggtgcaaaaccgctattcccgcaggcgttgcgcttggaattgcagtcacatggtgcctgtgcgctgccctgcgttttattgtcggtgaagaattctccggcatccctcttttcggcatcagcatgcccggtattgtcagcggaatcgttgtgggtatcgttacagtattactcgccgcaggagctcccgcaaaacgggctgcaaaagtatctcctgtcacagccgtttcaggcaattcacaaaatgatggtaatgcacaccacacagtaaatacacacctgtttaaagttgagacagcgcttggcattcatcacgccctgtctgcagcaaaaaacctgatacttatgacaggttcatttgccctcagtattattttattcttaagtttttctgttctgatcgattttgtcggctatattatgccgcagtcagccggcacatctgatataaacattacaagtattgacggttcaaatacagtcagcagtgatttgcctgatacaatcattggaatgcatggggtaaaacgcgtttacgggcgccgaagcagttttgatgtttccgcaggattacattcaggtggggctaagattgatattgtctcttacgatgactttgatttggactgccttgtaaaagatggtatgctgaaaaagggcagcaatatttcaaaggtatacggaaacagcaaatatgtgcttgcggtctgggataaagacagcacattggacatcggagataaaatagatgttggtaatgaagagcttgaaatcgcaggcttattaaaatataaccctttcagcagcaacggtcttacaaatggagaaataacccttgttacctccggcgctgtatttacccgtctgaccggcatcactgactactctctcatcatgatacagacagcaaaggatgtgacagatgaagatgtgacagcaatccgcagcatattagaccaaaactgcgtattaaaggacctgcgcggccagcacaattccggcacttattttgcatttgtattctgcatatacgcgtttttagcaatcattacgctggttacggtgttgaatatcgtaaacagtatttccatgagcgtatcctccagaataaaatcatacggagcaatgcgggcggttgggatggaccaatatcagattacgaaaatgattgcggccgaagcctttacctatgctttaaccggcggccttgtgggctgtgcagccggtttgctgatttacaagcttttatatgacattctcataatctctcacttcagctacgctgccataagtctgcctgccgcccctttactgataatccttttctttgtttgtatggcagcgattgcagccgtttatgcccctgcaaagcgaatgagagacatggaaataacagaaatcataaacgaattgtagctgcgttattgttgcagctgcgttattggcattatgcgccgggacttaccaccgggacggaaagccggtccgggggagggcggggttaagtccgggcttggccggtgcaaaggctgcgaaacagggaaatcattttccgtaagtttcgcagattcctgccctggcctcctgtaccaaaccatatcatatggttttatctttcgcctttgccggtcccggttttgtgttctgcaaatttgtcaatcaattcaaccttagacgttctccccatccactcataatattgacgccacagcgccaatccctgtaaagggacatgctctttgcctatggtgataaactcagtaatttggtcaggtttaagggagcaatcgtgttccatgccgttatctactataacaaatccagctatcacatctatttccacttcatccacggtaaactctataaaggtcctggtcttatattgaggatcagggctggcagcacccatagttcccatgttcaaaagaatgtttttgcatcgttcaacatctttttcatcaaccatgatgtcgatgtcatgaaacacctctgccactcctttaaaatacaaaagcagtgatgcaccgatagcccataaaagattatctttgttaaactctgctgttattttttgtaatacatccatctttttctgaagttcattcacgtttaacctccccttgcagattattctgaatctgctctctgcaatctgccctctgcaatctattccctcaatcctctctctcagtctttcctttccatccttcaatattgctcatggtttcgtaacaatattttgttgtgtggggatattcattctctggtttaccatgtactcttgcccacgcaaaagcaggaacagacagaatagattcaaatgacaggctgcctttcagttttcttctgccgctgacaatgtcgttgtaataccgtttggaattaattaatgcagcacatcgaatatataaaaactcatccgcagaaaaacttctgtccttataaatgtcccctgcaattttctgagtgtctaacgaatataaaagctctgccatggtatcatggaacgcaaaaataaggtcatctccccaggcagcaagcaatgtgacaagaggttcaatgacagcaatatcgtccccttgcttttcccaatccaggcaggcatctgtcaaatgaaaaaaatcaattgccgacattttcttctcatataaaatagcctgaataaaaatcggcggtttccccggcccagaagtataatattttctctcttttttaacttcattgtctttatccatattttgtctccttaaaatgcggctctccgtcccccatcacaagtaacccggcttattcatatggatactctggctcgatttcataatgtacatcaaagggttcaagcctgccgtgcattctccacatatcataggcgctcccggccgcaatcagattccgcttctgcgtcaattatacattccaccgccatttgaaatgtcggcatattgcccctctccattccttcataaaataaattatatcatatggcgggtgtatgcagcaacaggcagatagggacgttgcggaatccaggcggccatgctatacttttgttgaagtcagacaaactgtttatgatagggtatacccatggctgaatcacatttgaaaagaggaaacatatgcccgtattaatgaaagacaaatattataattacgattcgcttcacgatttggcttcgcgtattaaagctgtctttccctcattccaggaaaatgattttgtggaccatattatgaacgaaacatgggatgcattggaactgaaggcccgtatgcggcaaatcactatcaatttaggaaaatatctgccggcagactataaacaggcactgggtattatagaccaggtcattgccgggtatccttcagggtataacgataatgcactcatatactttccggattttgttgaagtctatggacaggatgaatgccattgggacttgtcaatggccgccatagaacgatataccccgctttcaactgcggagtttgccgtaagaccgtttattataaagcaagaagcccgcatgatgcagcagatggctgtctgggccaggcatgataacgagcatgtgcggcggcttgccagcgagggctgccgtcccgccctcccctggggccaggcattgaccagcttcaaaaaggacccgtcgccggtacttcctattttggagcagttgaacacggacccatcactgtatgtccgcaaaagcgtggccaatcatttaaatgatatttcaaaaacccatcctggcctggttacaaaaatcgcaagagattggtatggcagacatgagtatacggattggattgtaaaacatggatgccggacactgcttaaaaaaggaaatcaggaggtgctggatatcttcgggtaccacaatgccggttccgtggatatcgctgattttacgttaggctctgcgtctatttccctcggagaaaatatgacgttttcgtttacagtttcggcaaaagaaacaacaaaggtacggctggagtatgccatgggctatgtaaaagcagatggaaggctgagccggaaaatattccagatatcggagattttgttaaaggcaaaccagaaaaagacatatataaaaaaacattccttctcagatttaaggacaaggaaacattatccgggaacacattccgtcacgcttattgtcaatggcgctgagcaggataccttggattttgaattgacaatataggtattggctttatttattaccgcagcataatacttgataaactcaaattttcggaggtaaatatgatacttgaaacagagagattatatctgcgcgagatgaatcagtccgattttgactctttatgcagcatcttacaggacgaggataccatgtatgcatatgaaggtgcattcagcgatgatgaagtccaggaatggctggataaacaaattttccgttatcaaaaatggaactttggtttatgggcagtcattctaaaagaaaccaatgaaatgataggtcagtgcggacttacaatgcagccgtggaaagatacagaagtgcttgaaataggttatcttcttgcgcggccgtactggcataaagggtatgccatcgaagcagcaaaggcgtgtaaaacgtatgcttttgaaatattaaaggcagatgaagtctgctctatcatccgggatacaaatatagcttcccaaaacgtagccataagaaacggtatgacaatgaccggcacatggacaaaacattacagaggtgtggatatgcctcattaccgttatgtggtatcacgatgatataagccaaaattgtggaaggcaggaataaacaatgagcaaatacaacgccctgtgggagtatgtacagaagaacggaagccagtcattcaggcttacttttgaagaaatacaggattttgccggcatatccatagaccattctttcctgaattataaaaaggaactgacggaatacggctatcaggtcgacaagatttccctgaaagaacagacctggcagggatacttaaaactgaattttccgggataaattataccatatggcaagtgcatgcggcaacaggcagccggacggggaaaccgttgaaccgttgaaaccgtgggactgttgaaaccgttgtggaaatcaggggaccatgctatacttttataagcggatagcgtttataaaaaatcgtaattcggaggatatacttaatgaaaaatgtgcttattatttcaggtagtcccagaaaaaaagggaattctcaaagattatgtgaagaatttaaaaaaggagctgaggataaaggaaactctgtggaactgattcggttggcagaaaagaaaataggattttgtaaagcatgcgatgtttgtatgaaaaataatggcacttgtgttcagcaagacgatatggctgaaattctggaatcttttaaaaaagcagatgttctggtattagcaacacctgtatatttctacggtatttgcgctcaaatgaaaacatttattgacaggacatatcctatatggcagcatttaggagaaaaagaagtttattatattatttccgccggtctgggcgaagacatagtaaaacgttcattaggtgatttggacggttttgtcgagcatctagaaaaacatgagataaaaggacgtatttatgcaacgaatgttatggatgcaggaaaagtctgtggaacgccttacataaatatagcttatcaaatgggctgccatatataaacagagggcttcctgttcacagagacagatttaagccgcatgccggaggctggatctgactcccgtgataaatgtcattacttgattggcatatgggactatagcgaacttggaaatcataaaatggacttggagtgaatgatatggggattttcaagaaaacttttaggatgatttttaagaaaaataatggtagtgagaagaaacataataatacgcttgaagaggatattcatttggcgtcagattgggtggttaaagcgctaaattcatctggctacaaggcagactattctttagaaagcatgaaagaaatcgacagattttttgatgagcagagttccgaaacagggctgctttcaaaaaaccgtggtgaaatcttatttggtttagcttcatatattggagaatctgctatcaaattatatggtggagaatggaatactgatgatagcgacccacagggagagatacatatttctgtcaagttagcggacggtactgtcatttggcctgttatcagatgtatgaaacgatatgaacatgggtctgaagaaagtatttatgcctatctttttgttctaaatagttaatttgccagatgtctcccatcaaaagttaagctttccgattccttcagtgacctagaggatgcggccatctccagtacaaaacaaagcttttatcggaggacagattaatgaaacgaatgggtaaaattattatcgccggactttgtttgggactgccgttactctttgtaaaaatagtatttcaaatcccagatgacttattttggaagtattatctgatttgcggaggaatcacagttgttggcacagcagcattcaacctcctctacaaccggcgttatctgaaaaagatgcaggcagccgtacatctgttggaatccaaccgcgcagaggaatacatcacagaagtagagtcaatgcgccgtctcgccaaaggtcgctttgcaaactgcatgcttacaatcaatttgtcagcaggatactgcaaactcaaacaatatgacaaggctgccgaactattggaaagcatatcagatgtgaaactgtccggtgatttagaattggttcatcgtctcaatctctgcctttgttacttctatcaaaaacaaacaggccgtgcaatggcattatacgaaagcagccaaaggatattaaatccatatcgaagcagcaagttatatgggggaaatatcgctgtactcgatatttatgcagcaatcggccataaagattatgcccgtgccgcaaaattgctgcaaacagccaggagcacatgggataatcctcgtttcttagatgactattgctatttggaagaaaacattcatcagacccaatgaccttgaatacagtaacaggtgacggtatggtgaaggaaatatatatcaaggcaggtccagagaatcattggatgaattatataaagcccagcagattgatggtattgttttagaacgggactgggaatgtagtgtcgttagctgcgcccaaggtatcgcgcaaataaccttggccccaggaaaccgtttcatccgggatatgctatttaatgaaaggaatcacacaatatgggaacgttcagaaaaatcgtagtggacaattcagaatatatgtggcttttccgatatgacgattatgattatcaaaggattccatacctattgataactacaaaagcgttccccaaagctaccctgcatgtcaatttcccaatcaaggatcacttcctgctcaacagcggcctccccgcggtttttcagggacagcgagtgagcataaatttaaaccagccattgttcgtttcccagataatacaacagtgcagtaaacagatagatttctccaacctgaccggttatcattatctgaatggattagatatcttaaaaacaatcggttatgaattgttttggtaactttcagttcatataggcgttaagcaggattttatttggtaacttgtgtgacaggctaaaagcgaaatgtgagcttcctgagttgaatgggatgatcaatcggatgaaaaatcggggttgataaagataatgaggtaaaagtaaatgaaagaacttgtcggggacaaattctatacaactttgtctgaaaaatataacgaacttctgcttgactatgttttgctcagttgggatgaggactatcacggggcagaatctcacaaaaaagctgtaattgaagcaatattgtcaatacttaacacaaggcatcgtgtaggcaacaacataaaacatcctctgttttatgtgcatgaatcagacatgcagtgtattgaatgtgacgcaggtgcgttcttttatgaggataacagaggacggtttaataaaggagtctctgaaacgccagagaagatgaaaatgaactattggcttgctttttcagggccgccttatggtatcccctacagcaaagaggactttcgtaaaatcaatgatttactatttcctataccgtttagaaaggatttggagatatttagctggaatgatgatttctcaaattattttgatgatggtaaagaatggtggggaactgctctttggagtatatacgataaatggatgaaccgtttcgtcattataggagcttcattgacagactaatagctttaagccggtggtaataatgtgcagaatcagctaaaagacagggttttccatatcgtatgttagggcagcgtgagggtttgtccgtatggttgacgatctgcctgtgaactaaattcaactatgtgaaagaaggtctttcgtggatacacatgatagcctggggcaaaggggcctgggagatttcatgcatacaaaaaggacccaacgtatggttttcacatacctcaggtctattatttttactttttgagccccaaaacagcacatatataacagaaatcagcctcccggccctctgtctcctgcttttaattgccggattaggaaaaacacactggaaggaccgcttgcaaagaaaaacggcaggaacgccgtcctttttcatgttcttgcatgttgaaccgacaagaaataatcccatgtacaataggtatcgtcatgttctacctggattgaatagcctgcacacgccaggtattggttgcaaagccccattttttcttccaggttatcccgttcatctatatctacatatatatccaatcttcctcttccagaaaatcctcaaactcccactgctctttaattccaagcatcaggtcaaccgttggtttctgggtccggtagagttccatataatcctttgctgtaaaaatagtctgaatgcgctgtttttcaaccatatccttcgtttatcctccattatccatggcaaatagcctggggtttgtatgcccttgtatatccggaaacccaggtcaaacgccaaaatgtatcatatatttctccctacagattgcctcgcatattttaacagccagggctgccagctgctcatccctgttcatccttctatccgctatcactatctcctggaatgcggggagggattccggcagtatcagggtaatgccccaccttgtgagcccaaaatacgcccttgccatgccagcacctcccctatatactctgtttatgtgtcctgttcctcttttatccatatggatactcaggcccgatttcatgatgcacattaaacggctcaagcctgccgagcattttccatatatcataggcactcccggccgcaatcaggttccgcttctgcatcaatgcccgttttgcctggagataattcacattcatgacctttgcatatgccttgattttctccaggctgcaatcatcacctcttaaaaccagatataaatggtatactgtagtatctgagtgaatcggactgaaggaagtcacagcctcccccagattttcaaaacaggaaaggaaaacagcttctggtaatacaattgtttcccccaggttgtccgtcactttcatagcgtcaattatataatcaaatgcgtaatccaatccaaccgtgaaaattccatatggaggcagccggcggcaagcacacatcgggcaacggacacattcaaataaagacttaccatcatatcccatctgtctgacgcgcccccttatcaatccttatcaaaccacgcaaccagctccattgtgttcttgggcttggagccatcgtaatagttcacgtcctctgtaatcccgccttcctcgttgcttggctctatctccaagttcatggcgtatgaggttccaccaaaatcaagggctttcttcccctttcacaatccacattcattaaattatatcgcttccccaatgccttccaggacggacatcaggcttgcatatgaggcttcacttgccgccccataaagcatctgcagttccccgtccccatgcagttcccagtctccacagtccatgacggccaccatattgtccggctcattgctatagagggtaatacgcatgccgcaaagccagtttgttatttcaaaaggaagcttcgtaagcttagactgaatcagccccagctcctcctctgtcaaccagtagaattcttccggattgcattcaaaggtaaaaacacactcataagccagtgcggcagacaggaactcactggtcgtgggcgcgcaaagggtccagtttttatcatcctccgttacataaaccggagggtccggcagcatcaaatcctccctgcggattccggcccggcagactccctggttctcattcagaagaatcaagtattccggttcccacagccattcccacttctggaaatgttctggcagtatccatatgtcctgaacacagtggaacgcctttgtccgcccggcggcacggtaataatcctccaatacctgcggcagagcgccgaatagctccttcaaatatacaatttcattctccgtatacccctccaatgtatccactgcataaagcggcttgaacatctcccaaaaagctgatatcataatatcctcctcattttctattcatcgtcagctcctgtacgccgaaataggagccccttcttcccctcggttatgggctggatatcatatatggaatcttcatagcaagcccttgagtcctccacgatagcaaaaggccaggcgttcgggaatcctccctgtgccagttccgcaaggccggctgagtcatcctcaatttccaagcccgtctgtatggccctgacaggagggaattgccatatccttttggagaatcccagaagttcctcaattctttcttccttgaatctgactggatatccttccgccaggacatctgattccggtatgatgatttcatgggtaaactccccgtcctctgggtaattgttcatccagaacccccgcacctcggaataaccgccaaacttatatatcacctgcttataatcgtgtgagtggtgctccgtgaacccaaggttaaaatcctcttccagcttccgttggttccattcggtggtctcttccaatgaatcctcctcaaatccccaatagcctgattggaatttcattcccgcttcatcaagcaaggcatagaaatccttcacagatgtgggataaagctcatcccttctgaactggactgatagattgaaatacgccggcatactgcttcctccctctcgttcatgggataaattatatcatacggcaagtatatgcggcaactggcagatgggtggggaaactgttgtggaatccgaatgtacatgctatacttttataagctgatagcgccatataaacaaatcggaatttgtggagattcagacgatactggtggattttatctcataatatttcatgataaagagcaattactttattgggacataacagaagctggaatattacagcaaattataaatgatgattttgaaattgaatggtttgcatgattttcgctcttgccgaagtacccggccaatcttaatcttgtaaattccagtttgtcagacaaacgcaaagaatgaaaaaatcagaagttagagggatagccatgaaagaaaatattgcagcaacgttgacgggaaaagacgataaatatgcttgtgctcttgccgataaaatcatatcagaaagtttagaaaccgatgaatggtatgaatattttgatgactttgcctctttgcttaattatccaaaatcattagtgagaaatcgagcattgtatatccttgcggcaaatgctcaatgggatgacgaaaatcgtttcgacttgataatttctgattttcttgcacatataacggatgaaaagccaatcacagccaggcagtgcataaaggctcttgcacaggttggttcagcaaagccacaatatatacccgtaatattatcatgtttgcggagtgcagatttatcgaaatacaaggacagtatgcgtccgctgattgaaaaagacatagctgaaacagaaaagaaattgacaacgtaacttccagtttgtaggggagctgatcaacacaaaaaatcagaataagacagataatggaatgaccgaatgccagaaactaattgcatataaacagactgaacaattatgggactgaatgaaaatccgcgcttaagcgaaatgttctccgcctatgtctccacctatggaaatgatatagcgccatacagcagattatcgtgctgttccccggcagaaacagtttattcctggctttaagctgttagacttacggcttgcagtcccctccttgtggatgcatgatggaaataccaggggcttcctgctcgctgaaacagatttgagccgcatgctggaggccagttctgattcccgcgatgaatatcattacttgattgacatatgggactataatgaacataggtgactttttaaatcggaagctatgggagaatgacatgatgagtgatagagtcatattgattgataatattgatgaaatccatactactgaaatgggcgctgacagaatcagacggaatctgaaattagaaaatgttgacgtggttgaatattgtaaggacaaaattatggatgaaaattgccatatataccggcagggcaaaaattggtactgcgaaattgacagtgtaaagataaccgtcaactattatagttatacgattattactgcacacatcataaaataactccccatttttcgtataaaagtgggaaacagatgcgattccggggcatctgcatttcctaatatttttctatagaaaggatacagctatgctggttacgatacaacaaacaaaatcaaatactgaaaatttatttgaagttacctccaacggccaactcttgttccaggcaaaagccccgtggatgaaaatttccctgccgttcaatgcggaagacttacgggaactcaccttttccaatcctgccggggaaatagtttatactacccgctatagattcatcgacaacctcgtggaggagttgattcccttcaaatacctgctgacaaaagggcagcgtttcgggcagtttgaaatcatcggcaggaatggcagcgaagggtccttctatgtcatgcagaacggcttgtttgacagcaaattctgcattgagtgtatgggaaatgcctatctgggatacagccttgataggggaaggaacaattatgtgtccatctatgatgatgaaaaacagatagctcaaatcacaaagcctcttacagtcacagacaacctggatgtctatttccttcatataaaggacgagtatgcgtcaatcattccagtcctctccttcttcaccgtatattatgactatcggaaatacaatcacagtggggagcttaccaagaacacggttcagatatccaacagctatacctatggtaagaacaacgacaaatataacccaaactggattgccaaggagttcggccagcaggctgcggacgaattggaacagaaattaaggaaaataagagaacaaggttcggcccaggcaaagaaaatcgtgaaattagtgggcctggcttatctggttcttatcctgctggccattgtactgttcgtggtctttaaaagcatcctgggatgatgagggattttatcataatttaatggagaagtgaagcaatgactataccaaacgtatttttcaaaaatggaatctggattggagaaataggacacaatttatgggatgatttttatgaaaatactattctccttgaatttagggggtgagaagcaatggtgaagcctattagctatatttcgtatggtgaaaacgagaagaaaataataaaggctggaatagtggaaattcgtaaagttcttatgggtaatgataaaaataaaaagagaagtctgttatttgctctggattggtttatggacccttactttaaacaagatatttcagatattcacaatgaattggttgagcttttgcaaacagtggtaatttcttcaacggatgatgatgtgtctgaggatgctttacagcttttatgcgattatgaatggccaccttttgaaatacttgaaaaaaatataaacagggtatcgcagcgattaaaaccagatgtactgtatgcagttaatatggataaggaaatataactttcgatttatgtaggaatcatgctgtgaaaataaaaaaagttagtcttatattaaactataaagacgaatggcttaacaaacttattactgcatacaaaaataaaaaaattccagccggagaactttaatgcaattccagtttgtaggggagctgaacgaagcgacaaatcggaattgactgagcaatccggcggaataaaaaatatgaattggaatggattaagttatgaaatatagtaagacaataattttaaaaaatggtgtggaatgctgtttgagaaacggcatagaaagtgatggacaggctgtatgggattgctttaatctgacccatggacaaaccgattatttactatcctatccagatgagaatagtttcgacgtgatgcaggaaggtcaatttctgaaaaaaaaatccgaaagttcaaatgagattgagatagttgccgtagtcgggaatgtagttgttggaactgctggaattgaagcaataggctcaaaatataaggtaaggcatcgtgccgaatttggtattagcgtcgctaaagatttttggggacttgggattggacaggcactaatggcagcgtgtattgaatgtgcaagggcggcggggtatattcagctggagttgagtgtggttgctgaaaatgaaagggcattatccatgtatgagaaagcagggtttgttaaatatggcataaatccgaaaggctttaattcccgcgtgacaggatttcaagaagttatttatatgaggttggaattataagaaacttacaaattccggtttgtagggaaattgagcttaccgacaaatcggaattttttaagaaggcaataagtatggataatctttccattcattttcttaatgatgatgagcaactggccacgcaagaagcagtaaataaattggttttcaataataccggggctaatgacgaggcccaactggaagcccttgctgaacatctgggcgctatggagtggaaataaagatattgtgagggataataacatgccaatacagaatacgaagatgtctgcaaaagaaagacgcattttcagatatacccgggcagatgcatgggaaaccacaatatcccaggtcgatgtgatggagggtgtggaaaaagggaatgtaaggtgtctatattttgttacacctagattgcatgcaaatacaatcgttgattcctgcactatcactatcagtcaaaaccatattgatatgattcgggatgccatgctcacccgcctggaggtctgcaaatataaggaaatagagttccctgtggtattggatggattcatcaatacctttgagtttgcacctgaggaatccttttccaacataattactgttttcaacatttccgcatttagggataatgttgatgtggctatcattggcaatcccccatatagggggaaagaggtccttaaattgtatgatgatatttcaaaaatactttcagataatggggtgagccagaaatatcttgcgttggattcctctatatttccgtaatagcaaaccatctgattgatgatagaagtttaccagaatccataggaggttctatatgaatataagactgttttggaaggcagttttggaacaggacagggctgcaataaaaggattcttccaaagtaccgcatatgtgaattggcattgtacaaatgaatgttttactgtggatgaatttatccaggcaaactgcgaatatccgggagattgggatggaaaggttgagcgtgtcgaatgtgcagggaacctaataataactacgacgcatgtctttccaaaagacaggtcctcttcatttcatgttgtatcatttttccgaatagaggatgaaaaaattgtgtccgttgatgaatactggtctgatgatggcgaagcaccgctatggcgtaaggaaatgtgtataggcaagccaatcaattagcctattgtgttaaaaatccaaagtaagctggtgatgggatgggaaaacagataaattattggatggattatgataactttttgctggtcgcgcaaatggcagttgacttgggctgtacggttgtaaaagaggaccttaagttaggcaaagtcattgaaagcaaggatgccggtatcatcaccccctatggaacatccaattatccaggctactacttccatcttccggaggcaggagccatagaggtccttaccgtaaatggcaaggaatgtttggattatggctatactgcaaccgggaatgccctcattgaagccggctactcttccatcgtcaatgagcccgcaggcgttgccgggtcacggcagaaaaaggaaatccacagggcaagaatctattgcatatctggatattacgatgaaaatgaaaaatatatacaaaggccggactgtttgaccaaggtgtatcactccctggtgagatatgtgaaaaagatagctccttatacagaatttacagatatcctgataagcatgaaggacgaaaactacggggaggaatatgaatatagacataaggaatacataacaaaaaactgcctggatttgattaataacaaaggatacaaattatgttgaggatatcggttacacttttaacagcttgaattgcatgagaaatcggaagttgtaactgggattatttatattttcaaggtaaaaatgttatgataaaagggttgcaacttatagttgcgaaacttcgaggtttatgtggtagatagcaaccgcttataatgttaaatttttatataacacaggaggtgctaatatgacatttggagaaaaacttaaatttttaagaaagcaaaaaggcttttcacaagaaaggttatcacaacaattaactgtatcacgacaggcaatatctaaatgggaactaggagaatcattaccagatacagaaaatgtaatacaacttagcaagttgttttcagtttcgattgactacctgctaaatgataacatctgcagtgaggctgatattccagccgtccagcataatacaactgttttacaagataaatttcgttctaaaatactacttgttattggcttcatttgttctgctatgggttgtgctggaagtattacactaattgtcctctctacaatgataaaggttcatgttgaaaagaaacgtatattgccagacggttcggttcaatattacggtggtggagatatccttggttatgatttttggaaattcatatcagaatataggctgcaggcattattatttatttgcattattttaattattgctggtattgctattatatgggtgtcaaagaagaaggctaaaactaaaagcttattattttaatgaaagtaggaacatactctatgcttgccaacttccggtttgtaatacaatcgcaaagaatgaaaatttagaatttggaggaataagcacatggcaaataagtataaagtaattgatgaaaaaacatggaatagagcaatgcactgtatgatttttagaaatagtgttgaaccagcgttttgtgtaacctttgaagcggatattacaagatttaaacgtgtagttaaagaacagggggtttcttttacattggcaatggtatatgcagtttgtaaatgtgcaaatgatatagacgcatttcgttatcggtttgttgatggacagattgttttgtttgacaagatagatactgcatttacctatctaaatcaagaaaccgaattgttcaaagtggttaatgtccccatgatagacgatttaaaagaatactgtgagtttgcagaaacgatagcaaaggagcaaaaagaatattttacaggtccgttaggaaatgatgtttttcaatgttctcctatgccgtgggtcacctacacgcatatttctcataccaattccgggaaaaaggataatgcaacccctctgtttgattggggaaaattttatgagaagaatgggaaaattgtcattccaatatcagtacaggtacatcattcctttgttgacggcatacatattgggaaatttgtagataagcttcaaaagtttttcgatagatgttaaattccaatttgataaggtatctgagtggaaaaaaatatattctttttttcatatgatgcatttgggccgttatttatttatgtttggctgtatacatatggttttcaaaaaagcaattggtttctggggaaataagaaaatgtttgaggtgacggatataagaaagtataatcataccatgtccaaactttatgttgcacatgacattgtatttattctgcccggacttcctttgcttgcaggacattgttgcgggagttgtagtggaaactattgttttaatggcagtttattcgttggtgattaagaaaaaatacaaaagtaattttgacaggggtatcgtttgggatgaaacttaaaattataatcggattatatgcaggaatcctgttattcagcggttgtgcttcaaatacatctgttgtcgccggacaatctgctgcagtgaatgcagaatccgcaacaaaaggcattaacaatgaggaaccgaatgtaaatgacgcacatttagatgataccatttatatcggagaatatctggattctgatgtcaatgagccaaatcttgaaattgcgagaggtgatgataacaaatatatcgtacagataggaatttaccgcctgacttcattaagtgatggcattggggagttgacggctgatggtatgaactttactgcgaccgatgctgcagggaatccaatcaggggcatcattacagcagacggccaggcagcaaccgtcacttttacagattccacttgggattatctgcaaaacggttctgttttccagtacacaaaatcatctgatacttcaaatatctggaatgaatagaccgcttatcagggattgggttaagcgattacgaatgggatgaagataatctctatagtcttgaatctatggtaaagaacacatagaacgcggtaaaaataaaaagggatacagcgtcacaatcgtataatggaaaagaatttttacaaaatgaactgtgaaaatcgtaatttatctgggggtgcttcatatgaaacgctatgaaatttacaagcatatcggtaatctatccccattaaataatgggtggataaaagaactaaatttgatttcgtgggacaataaagagcctgtttatgatatacgaacatggaatagcgaacatacggagtacggaaaaggggtaacaattacagcgggacagatggtcgttttaaaaaatctgcttaatgaaatgtcaatattctgatttccaccaggatgattcctacaattacatcgccaccagtacacagaaataatataggctgctctcctatcctaccgagggcggcctgtatttatttccccattctctaatgacaaaagaacttacttctgcagcaggaaggaaacgtggacggattaggcggtgtatgataatataaaagtaatattgaaaccagcgaggcaaataaatggatgagttccagtcaatggttgaagaaaccaaagcccttgtacaaaaggaaataaaaaataaagacaatcgccctgactttattttggagaagcagctatatttaattttagaagaattggataaaatggagcgaatcagagacatccatctattccatccatattgcccaaaggggattgcggatagctgggactattcaaatccattggcgattcgattactggaattattagaatcatatcgggagttacaataacgttgaggcagtttccggattaccgggctgacaaacctggaattacagagaggaaggaactttcaatcatgctgatttatattgaaatgtatccaaaggacagattgctaaatggcccgaaatgttctgtgtctgaattaaagaaaagactggcaaaaattctggcagaagccgaaacaaaggattttatttcaatattttgtgcgcgatataattttgaagaaatgcctcttgataatgtgccgattaatgaaaatattgaagttgactattatatggacatagatgcaggacttattcataaaccatcgcgttgagtaaaactttcactcatggtaagaaaggattcccggcttaccgggctgacaatcggaagttgaggagatacgaatggaatgactgaacgccagaaactaattgcatataaacagaccgtacaggctgccaaaaacaaattaaaacaaatgagcggtatcagcatactggaacttttagagcacaatgaaaatccgggtttaaacgaaatgttttccgcctataccactacttttggaaatgatattgaaccatatagcaagttatcataccaatccccagcagagacggtttattcctggctcattggtactatggatttgaaggaaaacgatgagtattacttttactgcggcatatggtgcaggattaagctattggatttacggcttgcaatcccctccctgtggttacataatggaaataccaaaggctttctgctcgctgagacagatttaagccgtatgctggaggccggctctgattcccgtgatgaatatcattatctaattgacatatggaattatagtgaacagagaaattattaaatcggagtttgaaggaggtaaaataagatgaaatataaagttaaaataagtgtcattgataaaaaactttatcctgaattgcaacaacaatattgccatgaccccaattcgggtatctgtccttgctataatgtgggagatgaatttctattttatcgtgatgatgaaagagatgatttctggcatatgggtttgaatacattaattaagaccagtggtaatgcagatacagttgcaggcggacctaaaatgccattttgttccgaagcatgggacgctatttcacgttatatttataccggacttcaaggcggctctatcatgaaaggttggatgagagaagaaaacaccatgattacctgctgctcggacggaacaaggcctgtaattttcaaaattgagcgaattgactacgaataaaaatctggaacttttagtttatgcaaccggaacacagaccattaggaggaaaaatgattttatacagacctgttggctcaaaagaattggagctgataaagaaaagcaattatcgcagatttccaccgagattagcggaacagcctattttttatccagtcctgaacgaacagtacgcaacggagattgcttccagctggaatgtaaaatataatgaagaccacagaggttatgtcacaaagtttgaggtagacgaccaatattgcggacagtttgaagtccatcaggtcgggggcccgcaccataaggagttatgggttccagccgaaaaactggatgaatttaatgagcatatcatcggggaaatacatatcatcagcgaattttcagatagataatatgttatcttgtaaaaccggtgtggcctcggaagcaatgagagggctatcaggaatagggagtttaaccagaaaggaggtccagagaatcattggaatacaaagtgaatgaccaggggcttaacgcttccgtatttatcccttttgtcaataaagtatggcctggagattatgatgaagagaaaacgcagtcagcattgtcaaaaacactgaacataagcgcttacgaaaataacgtacttgtaggctgcctgcggattctttcagacggctatttctttggcacaattacagaactgcttgttcttcccgaatatcagaaacgtggtatcggcagcaagctcctccagcttgctaaggataatacgccaaccatgctgtattttggcgcacagccgggagttgaaccgttctatgaaaggaacggttgccaacggagcctgcaatcctacacaataaggggcacaaaatgaccaattacacatttgaagagataaaaggattgttattaaaaagcatccaggagcatgattttgaatcagaattacgcttatgctttcatgacaacccgaatgaatacatgattataatttatgacgaccactgctcttttcagcggtgcggcaatccaaaagaagcaagcggcgagtacaactacaaatcattggatgagctgtataaagcccaacaggttgatgggattgttttggaaagggactgggaaaaaattaaagagttgcagtgtacggattttgacatattgggcctatgggactaatggagggataccatatgacagcagaagaagtcttttgcgagttaagcgataaatatggtgatgattttaactggcatatgctgccactctcaaatcatacatttacagcagagctaaagaaagaaatcggtaagaatcattttctctatcataaacagatatgggcagtggccaaatgtgattcaaatgatgatgtcttgtatctggctgataatggcggaggcgcagacatatattatattttccatttgacttattctgaatgtaatacagatggattcccccgatataaaaagtttgaagggataaatgcagtaaaagaatatatagaacaatcattaaatcaggactcatctttttaaaggagcgcttatgttatatctgctggtattgactgaccctgaattatcttatgataattattcagaggatttttacattggcctatttgatactgaacagcaagctgaggatattgccaagcattatcttaaaaatataaaaggcttctgcgatttcccatgtacataccgtattgtgaagaaagacgttattggcgatttcaacagtaggatatctgattacttatggacggtacatggatggaatacaaatgaatacctagatgagatagacataatcgaaagcccatgcttcctcacagaagaacaggcagacgcagagcttccggtcatgaagaagaaataccaacgggaagaatggactgtaacccgatggaaaataggcgcattggaatggcgtgaaggttttgtcagaatggtcgatggcgagcctgtgaactgattgcaaaatcaaaaggagataaagaacaatgagcaaatataataccctatgggaatatgtacagaaaaacggaagcccatcattcaagcttacttttgaagaaatacaggagattgcaggcatccccatagaccactctttcttgaattacaaaaaagagctgacagactacggctatcaggtcggtaagatttccatgaaggaacagacggtcattttcaacagaatggattgataaacagggtgttcgaggtgataaatacttatggaatcaacagaagaaaaaccagctgggcaggaatggcaatggtgcctggtcgggaatatcgtcggggaacataaatacggggaaacggacgaaattccggcaacgagctgtgtggccgtatccactgccatatagatgctggggcgtcccacaaccacagaacggtcaaaccgggacaccaggtaaatgtcggcctcggtggcgtccatctggaacgcgcccacccggtccttccacctcatggtggagccatacaatggccgctcattcctctggtaattggagagccctcccctggagacactgcacttgatggacttgctgtatccatgcctgtagtaataatgttcaaagctgtaccatgaagggactacctccatcagcttcccatccggcgtcatataccgggatgccagcatgtggtcgtatgtatcccttagggacatcttctttgcgctgaaatagaacttccgtatggcccagtcaaaattccttacgtccctatcttttcctctttcccttccccctttctccatgagcaccagccttgccagatatttgtaatacagtcccagtatccgtttccttgtggtcccgttttcttctgcaatcctctttgccatggccagccgcgatttcccgtcaacgatgtaaatggaatcctccagcaacggttcaatcaacgcaagcctcttcatttccgcctctgtcagatgctttgcctgctccagggcaaccctgtacccctccggcatctctaccttctcacaggcctccaggaaggcagccgtgatgtattgcggcgccccaggctcgtcataggagatgacccaggccccatggtccagggcaatcagcctcttgaacaattccccattcatcctaaagaacaacctcatcccctcctctgtctatgaccacgattttccagtcatccacgtcaagctgcttccagtacctgcgcgacagctccagcttctggatggcagatttcttaaccagctgcgccactgataccacttcccgtatacccgtagtcccatccgcattctcaatccagaagtccgaagcccaggctatcccgaagcattccggacgtatccccagccttgagacctcttccataaaacccgggtccaatggcaggatgcatttatacttcaccacatgggggctggcctccagaaggtctgcatatgcttttgcgtccttgctgtgtaccgacatcaaagacttattcttttcactgtaaaactgtatatccctatactttgactccgttttatccatatatgcctccttgctccatgtgccctattccgggtgctcaattacctcatagctgcggaaggcgccacacttcgggcatggggcgacatcccttctttccagcatttcctctgttgcctcacttatctccctatcacagcagcccacccttatcctggggaacctacgcccctccaccacctctggccggaacctcctattgaatgcaatgtaatcaatccatccctcactgtcgaatatccggtgactgtgcagctccaacgcctccttgtgcaaatcaaagccataccttggataatgcatctcctccctgcaccacacttccagcgcctccaagagccacgtctccccatgcagcccaatgacctgttccgccagctgataccaaaggtcctcccggatgtccccgatttgcgtctggacccctttgcgcaaggaacgcttcctttgcctcccaaacccgtctgattcgctcaccccggtcccgtacatgaagcggatgtcctcaataccaagagaagggatatcgatgcccgagagggaattgatttgccgtctttccatgaaaatcctcctttccggaattaatccaagggtctatgttgttgtgccatttaaaataggcatattgtcccacaaaatagcacatatataacagacagcagcctcccggccctctgcctcctgcttttgcctccagaatttttgccctctggcactctcatagcccttccctctggccccctctttcctcccctcgccctctggccccaggcagcctcaaccgccgccaaagcctttgtttacaaggggtttcagccttttgtctccttattcttctccctatttttaacggcagaatggccctgggcagggcaaatcggccgatggccccggggaatgcctgggacaaggggcctgggagatttcaggcacgaaaaaaggacccaaagtatggttttcacataccttaggtccttatttttgatattttagccccaaaatggtgctgttttgtgggccaacgtgcctattttaagtggcacatcaacaacaaattacattcccatctgcttagctacctcagcagcaaagtcctcgctcttcttctccagaccttcgccggtctcgaaacgaatgaacttctttaccttgatggatgcgccgttagccttggctacagctgcaacatactgggaaacgctctgtttgccgtcttctgcctttacataaacctggtctaacagacaggtttctttcagctctttgttgatacggccctttaccatgccctcgatgatcttatcgttggcatccggcttctcattcttagctgccgctgtaaggatttctgtctcttttgcaatataatcagcgcttacttcgtctctgctggtgaacattggctttaaggctgctgcctgcatagccacgttcttagccatatccttgatgtcatcgttaacaacatctgtctctacgtctaccaggacgccaatctttccgcctgcatggatataggatgcaacaaaaccatttgcctcctcaacctgctcaaaacgacggatattcatgttctcaccgataatggcaatctgggaagcaagtgcttcctttacggacaatgtctcgtccttagcccatctctcctccatgaatgcatctaaatccttagcggaagtggtaagcgcctgtgctgcaacatctgcaacatatgtctggaacttctcgttcttggcaacaaagtcagtctcagcgttaacctctacgattacagccttcttctcatcagcagctactgctgtagctacgatgccttctgctgcaatacgtccggccttcttggctgctccggcaagtcccttttctctcaggaactctactgccttctccatatcaccgtcagtagctgcaagagctttcttgcagtccatcattccggctccggtcatctctcttaactcttttaccattgctgcggttactgctgccatttcatcttcctccaattttaaagttttaattaagcctcaacagcctctgtctcgaaagcctgggcaggaatctcgatttccattgcgccctctaaaacttcgccctgctttgcttcgataacagcatcagccatcttggaaacaatcagcttaacggctctgatggcatcatcattgccaggaattacataatccagttcttccggatcacagttagtatcaacaataccgattaacggtataccaagtgtgtgagcttcctgtacgcagatgtgctccttcttcgggtcaacgatgaagattgcatctggcagtctcttcatatccttgattccgccaaggtttctctctaacttgtcccactccttcttcagggcgattacttccttcttaggaagaacatcgaatgttccgtcctgagacatggtctcgatttctttcagtctgtcaatacggctctggatggtcttgaagttggtcagcataccgcccagccatctctcgtttacaaagtacattccgcagcgctctgcctcagccttgatggcttcctgagcctgcttcttggtacctacgaacagaatggtgccgccgtcagcagcaatgtcagatacggccttgtaagcctcatctaccttgcctacggacttctgtaagtcaatgatatagataccgtttctctcggtatagatgtatggagccatcttagggttccatctccttgtctggtgaccgaaatgtacaccagcttccagtaactgcttcatagaaattacgctcatgttatttacctccatttggtttttagcctgctccgtcgcgtatgggagttcaggctcttccgcctgcttctgacacttcccggaagacctggcaaactgctgcccaggcaccgtcccgcagaatccacagacgtgttttttgtcagcctttcaaatatatcacaaaatatggcagcttgcaagcacttttagtaagttttcctgcaaactgccatatatattaatctgactctatattacccggctatccgccaacagctttttaaccgtgccctttatctactttaaatttgagttggatgccttgattgtcttcagttcatcaaacaccacgtcattcagaaccttgatataggttcccttcatgcctgaggaccgggattcaatgacaccggcgctttcaaacttacggagcgcattgacaattacggatcgggtaatgcccacgcggtcggcaatcttactggctaccaggatgccttcgtttccgtccagctcctcgaatatgtggataatagcctccagttcggagaaggataacgtgctgatggctgattttacaatctgcaccttccgggtctcctctgcattctcctcattgacagaacgcatcatctccaggcctaccacagtggttccgtattcactgagtatgatatcgtcaatatcatactgggaatccgacttgtaaatgaaaagggttccaagccgctctcccgctatatcaatgggagtgatgatggcctgatacttccttacattttcctcggcaaagccaagggtggcaagatttacgttctccttggtggacaaaacgcttaaaagacgttcgttcagcatcttatccacataacctccgacctggtcttcgataagttcctctatctcatctaccccagaacagatgctcacccccagaaccttgcccttcttgctgattaccaggatattggataacaatatctcgctcaaaactttacagatgtcattaaaaacaactttatgagaattattgttatgcaatagcttgttgatttttcttgttttgtccaacaattgaacactcatctccgaaagcctccttatccaaattgtatatcacccaaaaatactctactaataatagaattttaacacaatttttaagcaataacaagagttttttgaagttttcgattattttaagattttgatatttttcctttttgtttttacaaatttttctatttttcactcttatccatgcggtagccacaggtctctccggcacataaaagcttattccccttctctaccatataagagccgcagaccgggcatttctgagtggaaggcttctgccaggacataaagtcacagtcaggactggcctcgcatccatagtagagacgtcccttctttgtcttcctgcgcaccagctccttaccgcacttcggacatgggataccgattttttcaagatagggcttggtgttcttgcactccggaaatccggggcatgccagaaatttgccgtgaggaccatacttaatcaccatctggcgtccgcacagatcgcagaccacatccgatacctcatccgcaatctttacggattccagctccttctcagccgtcttaaccgcctcgtccaggtcaggatagaagttgctgacaacggtcttccaggccacagtaccgtctgccactttatccagcagagattccatgttggctgtaaagttagggtccacgatgcttgggaaggaattcttcatgatgcggtttaccacatcccccagctccgttacataaaggttcttgctctcctttaccacatatcttctggcaatgatcgtggttatggtgggagcataggtacttggacggcctatgccctgctcctccagcgcctttaccagggacgcctccgtgtagtgtgcaggaggctgggtgaaatgctggcttgggtccagctgttccagctttaggatggttcccttttccaggttgccaaggacctgatttttctcttcctcatcgtctgactccacgtaaacggacataaagccttcaaaatccagcttggaagccgatgtggtgaacaggtggctgcccgccccaatctttacagaagtggtctcatatacagccggcgccatacggctggctgtaaaccgcttccagattaactggtaaagccggaacaggtctctttgcagtgattcttttacaatggtaggagtcaatgttatgtcagtgggacggatggcttcatgggcatcctgtatcttaacaccttcttttttagcctggcttccctgagcaacatatttctcgccgtaatgctcctttacaaatgatctggccgctgtgtccgcctcgtctgcgattctggtggaatccgtacgcaggtaggtgataagacccagggttcccttgccttttacctctacgccttcatagagctgctgggccaggcgcatggttttttgtgtggaaaagttaagtaccttggaggcttcctgctgcagggtactggttgtaaacgggatgggcgccttctttacccgctcccctctctttacttcctccacctcgtatttacatccctctaactggctcagaatctgatccagttcctccttgttgcggataacagccttaccgcccttgaagtccctgttcccataatactttgccaccaaaggcttcttgttccctttcaggagaagatctgcctccagattccagtattcctcagggataaatgcattgatttcgtcctcgcggtcgcaaatcatgcgcagagcaacagactgtacacggcctgcgctcagtcccctcttgacctttgcccacaaaagcggactgatccggtaacccaccatacggtccagcattcttctggtctgctgggcatttaccaggttcatatcaagctccctaggggtcttgaaggaggcctttaccgcgtttttcgtaatttcattaaaactgatgcggtaaacatccttactcttaagttcatccagcttaagagccttcatcaggtgccatgaaatggcctctccctcgcggtcagggtccgttgccagataaatcttgtctgccttcttcacttccttgcgcagcttggccagaacgtctccctttcctctgattgtaatgtacttgggctcatagtcatgttccgcatcaaatcccaactgactcttcggaagatccctgacatggcctcccgatgcatctacctcatagttggcgcccagaaacttcttgatggttttcacttttgctggtgactccacaattaccagataattcgccattgtaaaactccttactcgctgttcatttattttcacaaaatggagacacaccccggcggatgccggaggatatccaaaatcctgacacttatgtgattgttttcatgtagttctgacccgatgttctcactgcaaatccttccaattccagctccagaagggcgctcatgcagcgtcctgctgaaagtcctgtctgcaccataatctgttccagatgtctgggttcggaatctaggcaactatacaccattttttcaatcttggcaagtcccttctggtctttttcacggttaatacactttttttcgtgaaaaatgcccatatagtccagcacatcctcagggctggtcaatatccctgcgccggactgtataagctcgttacaccccacactcaggtcatccgtaatccggcccggcagcgcaaatatctccttcccctgttccagacccaggctggctgttatgagggaaccgcttttctttcgggcctccattatcagaatcacgtccgaaaggccgcttatgatacggttgcgcatagggaagttcctggccatgggttcctcatccggtccgaactcggaaaggatgcctccctggaaaggaatcgcttcatacagatcataattgctcctgggataacagatgttcacgccgcacccaaggactccatacgtcctcccctttcctttcaatgcgccctcatgtccggccccatctatgcccagggccagaccgctgacaatctgtataccggctcttgccagctcctttcccataaatccggctgcctgtctaccgtactccgaacagttcctggcccctatgatggctgcggtgggacattcctcatccggcagctctcctttaacataaagtcccatgggatagtcataaatatgcagaagccgtttgggatattccctgtcaaggggtgttacaaaacggattcccttctcctgtaaacagttatactcccggaccatgccggaaaaccgttccttccaccggtcatacgtgcggcatttttcctcgctttgtaagattcccagtttctttaattccattccttctatataatacgcccgctcaaagcttcctgccatctcccatatacgccgtatggtaactgccccaaagcccggaatacgggtgagccagtacagatattctttttcatgtccttggactaaatccatctccgggccgaaaaccgcattccggctggattcctgctccctactgttccctatccccatatcttttcctccagtcccccgtatcccaatgcttctgccagatgttccttctttatacccctgctgtcctccaggtcggcaatggtcctggcaaccttcagcgccttgtggtaccttctggcactaaagcctcctgactcatatatccgttgggcaaagtccttctcctcggctcccaggctgcaatgcagttctacctctttcatacccatgcggctgttaaaacgtatctttgagcccaaaaaacggcgttcctgacgttttctggcatgctccacccgtttccggatggacgcagagtcctcattttcaccctgggccggattcagttccccaaaggtaaccggagacgcctgggcgcagatatcaaaccgttccagtatgggcctggatatatgccccagatatcgtctgatctggttctccgagcaattacagcggttcctgtccggatagaatccgcatggacacaggttcatggctgctaccatcatgaaatctgccggaaattcataattgccagatacccttgtcaccgtaattttccgttcctccaaaggctgtctcaatatctccaccgcaaaagggctaaaatgaggcagctcatccaaaaaaagtactcctcccgaagccagagacagctcccctggcctgggaggaacgcctcctcctgccagagccctggctgttatggtgtgatggggacttctgaacggtctctcagacagtaagggacgacctgccggcaggagtccgcagatactgtagattctggatatctctatgtcctcctcacgcgtcagtccgggcaggatagttggaattcttttggcaatcatagtcttaccggttccggcgctgccggtcaaaagcagtccgtgcatgccggctgccgccacctccgctgccctcctcaatatggcctggccgttgacctccctgtaatccaaaccatccttcttctgacggccgctctccggacggtaaagcggagcatggcacggttccatggaagccgtgcccttaagtatccctgccatatggcccagagattccacccccaccatatctaccccttccattaccaggccctccgccacattttctatcggcaggaaacatcttttgatacccttctccctggccatggctgccagggaaagcacaccgcttacaggtttcaccctgccgtccagccccagttctccaattaccatgctgtcctccagcatatctgtccccaccacctgaaacgcgcccaatatggcaaccgcaatgggaaggtcataggcagtacctcccttgcgtatgcctgccggagacaggttgacagttatctttttagccgggagacgaaatcccgaattcttaagggctgtcctgacccgatcctgggactcccttacctctgaagccagctgtcctgatatggaaaatcccggaagcccgtcagacacatccgcctccaccgagaccaggaccccttccacagcccatattcctccgctgttaattcgcgtaaacatccatccgcccctttcaccttgctggtaactataatatacattcataaataagtggaactttggcacgataccgtaccggatttaaatataagacaggataggaagaaccctatcctcttgaatgaaagatataattactatactaaagggaacataaaattacaaggggcaatctgaactgttttccataacatgtcttctgggggaccatccggggactgctgcgcctcctgtcccatcctacttttgaaactctgtcatatagggccggaaacgcaggggcagatgggttctctggcataccgggttacggcgttccctgatggcaatggtatcgcagaacatacgccacatgtcctcgtaagtctcctcgtctgttctctccctaagccagcggctccatccccggtcgctgttctcctgttccggttcaaggggttggtttacaagaaaccaggagcgtccggcgggatggactgctgcccttttatggttctcatcataaatgacccagttttcctccggcagccggtctgcaaagtgaggtgccaaaagagtcatgatatcgttcttcggaccgatacgcgacaccagtatgcctcccggagtctctgaaaagcgcagaaactctgtcagcagatgattttcattgtaaacattccggcacaggccgaatatatcataacaggccggaagctgaagcatgtccagtaccgacgggccgtggcggaaggcctgtatcaggaacctgtatattttatccgcccgttcccggtcctggctcagggaggcggtgtataccttcctgtatatctcctgggagagcttggcgcacacggaacggataaccttctccgccttttccgggcagatctgtacatccctgtactctgcaaaaagctccagttcctcatattctccctttacggccagccggacattctcatggccggccgggtcagaccaggcatcgtatacgccgcagagaatcccctcaagccatggctcgcacatgtaaaccgtcatatggtgcacctcctcaatccttacaggcttcctgtcacagaagcataatggtcttcgcctgtcaccggcatcttaagatgcatgtcatcaaagagtgtgagctggcggaaactgtccctgttctcaatatcccaggctttgcgcctctcatctcccacaagacaggatgtaatataatcctggtccagcctggcgccttccatcatgcgccctttgcaggtgatgaaatatctggcccgtttcaggaccacccccattttctttaagtcctcgaaccggagtccgccctgctttctggcacttacaattctctgggccgactttactcccatgccgggaactctgagaagctccccgtaggaagccctgttgatttccaccggaaacagctccaggtggcgcagggcccagtcgcacttgggatccagaaatacgttgaaattcggctgttcctccgacagcagctcctcagccttaaatccatagaaccggagcagccagtccgcctggtataacctgtgttcccttaacagaggcggtctggctgtcacggaaggcagacagctgtcgtcgttgaccggcacataggcggaataaaagaccctcttaagaccgtaattctcatacaatgcctgggtgacagccatcatctggtaatcattctccggagtagcccccacaatcatctgggtactctggcccgcaggcacaaagggcgtcctggcataccgggagtcgggaaggtgccttctttctcccccatccctctgcatggccttctgtccatcacccggatcatccggccccccgccggataaaccatggtttcccggcaaaagggcgcctggctgtgccagctccggacgaatcagggcagcgccgcctgcaaaaccagccctctccgttgcatagggctttttaaattccctgtcatatcccaggagatggctggacaccgcaattccctgctgcacctgacgcatgggctttaatatcttatccctggtcttcccgggagccagattcttaagtccctcagccgtgggaagctccagattaatgctcatgcggtcagctaaaaaacccatccgctccaccagctcagagtcagcccccggtatggtcttcacatggatataaccgttaaaatgccactggttcctgagtttatgcagggtctcgtaaatcagctccatggtatgatttgcgttatacagaatgcctgagctcagaaacaggccctcaatgtaattcctgcggtaaaattcaatagtaagcttacacacctcatccggcgtaaaggcagtccgcaccacatcattggaacagcggttcacacaatatttgcaatcatagatacactggttggtaaacagaatcttgagaagggagatgcatctgccgtccgctgaaaaactgtggcagattccggcctctgaagtgtttcctatactgcctgcctttccctttctccttaccccgctggatgtacaggccacatcatacttggctgcatccgtaagtatctttaacttttcctgtacgcttaaattctcctgtatcaacatgatatcaccatccagaacatatgtttgttctgatagtataacacagaattcagacaaacgcaatcgcaaaagaacatttgttctttttgcttgccggcgaacttttagggatgctgttttcaatgattcaacacgttcaggctattattttaagtcccatattctctgactattattttcatacacccccatgtatgaaacctaattataaagaggcctgcgcccgtccccgccatatcatatgacgtgaatccggccgcaggcctcacagttatggaaaaaatcaatggaacataattctgtccgggatttggatttgtctctaatccctgtatccgttgggattcatggactgccatttccaggaatctgcacacatttcttcaatccccttctcagccacccagcccagctcacgctttgccttggcagaatcagaataacaggtggccacatcaccttcccggcggggctgaatctcatattttaacgtcttgccgcaggctttctcatatgcgtggagcacatccagcacactgtagcccactccggttcccaggttatagatgctgacgccctctttgtcctgcagcttctgcactgcctttacatggccctttgccaggtccaccacatggatgtaatccctgaccccggtaccgtccggcgtgtcataatcatcgccaaaaacattcagatggtccagtttgcccactgccacctgggcaatatagggaaccagattgttggggattcccttgggatcctctccaatcagaccgctctcatgggcgccgatggggttgaagtagcgcagcagcaccacgttccactccggatccgctgtatgtaagtctgtcagtatctgctccagcatgcccttggtccgtccgtaaggattggtaatctctcccttggggcagttttcagtgatggggatttctgccggatctccatacacggtagcggaagaactgaatacaatatttttgaccccatggctgcgcatctcatcgcagagaatcagggtgcctgtgatattgttgtgataatactccagaggcttgcgcacagattcccccactgccttaagacctgcaaaatggatgaccgaatcaatctcctccttgtcaaacacttccttaagggccggctggtccagaaggtccgcctcgtagaattttaccttcctgcctgttatcttctccactctctccagtgccttctcgctggaattataaaggttgtctacaacaaccacatcataacccgctgtcagcagttccacacaggtatggcttccgatatagccggcgccaccagtcactaaaatagccatggtatctcctccttacgaacaattgtttgctgcaaaaaggcggaacaggttaagctgtctgaccgttccgcctgttatgactagtataaagggaaagctgtcataaaacaatgcacaattcttctatctttttacaatattttttgaatgacaccccttaaccgtgttttgcaaactctgtccgtatcttctcaattgcctttttctcaatccggctcacataagaacgggagatgcccagcttgccggcaatctcccgctgggtatgctccttcccgcggtacagcccgtatcgcatccccagaaccgtcttctctgtctctgtcagacaggactcaaaggcctcataaagctcctttacgtcctgttttaaaatcatggtatccagcgtctctttattgtccatctctatcacatccaccagactgacggtttccccgtccttgtctactccgatgggctcaaaaagggacacttccttggaatacttcctgctggctcgcagaagcatcagtatctcattttccacgcatctggctgcataggtggccagtcgtgagcctttatctacgttaaatgtattcactgccttaataaggcctatggttcccacggacagcaggtcctccatgtcgtaatcagagccctgatacttttttaccacatgggccaccagacgcatattatgctcaatcagcatatctctggcagactggtcgccctctttgcagcgttccagatactctttttcctctcctgctgataatggtttcggaaaagtcttcaaagaaagccaccctgcatattcttaatcttattctatgcgggggcagcttgccaagtgcttttacaagtttttattggcttatactattttccgaatctatgacaaacagctccttaaacttcttccggtccaggctgtggttgtacacaagtgcctcataatccagtaccgtgtcctgatagggacagcgctccgactctgccttggcccagtagtaataggttccctccctgtcatagcagcccagagggtggaccaccggaagttcctccctcatggcaagcagaaaccggttatagggtgtcatctcaagattggccctccacaggacctcagaagacaggtagacagcgccgagacgccccatattcccggagggcatgctgtaattcgtccatataataaatggggtctcgtaccacatgagatgttcctgcgccggaacttcagaactgggcatgccggctatgtcatcgtaaaattcatcctccacgctgggctggtgatccccgaacatgacaatcatggtgggctggtctgtccggctgaaatactccaccaaatactggaatgcctggtccgaacgcttcatgagggacaggtactggtccgtctttggatattttccctcatattggccggtaagccatacctcctgttcaaaattgtcgtaggtcccctcatatccaccgtggttctgcatggttacattgaagataaacagcttatcctcaggattttccttggcttccaccacctggatcagcttctggtaatccgcctcatcgcttacatagttgcgcagctcttcactgccctcgtaaaattcctggtccaggaacgcgtcaaatcccatattctgatagcactccacccggttccagttttctccgggataagggtgcattgccacgctgtaatacccctggtcctttaaggtgctgaccatggaataggtccccggttttacattgaactggtaggcaatggaattggcaggcagcagggccatggagtccccggtgagaaactcaaactctgtattgcttgtcatggaaccgaacacgggcacgcaaaggctgcccctgaccgtgttttcctcaaggctgtccataaaggggaaatattctgtattggtggtaaaatcacctgccgtcttaagctctgccaggctctcgttcataatacatattaaattgaccggcgttacaggctgcccgtcctccggcgggttttccgggttctcctccaggcggctatatatctcctttagcctggcgttactgtacccctgaggcggcttctttaccacatactgcagggagacagcggtggacagcacatagccgtattcctggtatgtcccgttgatggcccacatattgatgcccagcccccaggaagggaccagaacggcaaagaaccatgccccataggccgctatggaggcagttatgccgcctcccaccgccaggcggagtttccaacctttaacccggcgcggtatgaaccacaggaacacgttcatgagcagaagcaggacaaaggctgctttcatctgacgggtgatgaaaaattcgtagttgccggatacggtcatggctgtcctgaatgccatcacatcccacagcatgatggggcggccgcggaaggccaccacaaaggtctccgccagggaaatgacatataggatgcaggaggcagcgggcacagcgattctggtcctccccgtgacagcaaacaaagccagatacagcacataaatccagcctatgttcaaagcagccatataataaggaaccgtgtccagattccccgtgacatactcaaacataaagtatgacgtcactggggccattagcagacacacggttcccgctgtataccatatatattttataatctttatcttattttcttttgtcaccattgtcgcctttttgttagaattttgttaataaaatttaataaacttatcctaacataaaggatttaatgattcaagagtcaaatgcttccatgaatgacatttcacagacatttcacagaaccttcacatttttccagcccgcttctcagccggagggaaaaatcctctccccgtccaaacgctcttatccttaatattcattcatgatatatttgacctttggaacaattatatgggtctggacctgcgtaatgcgggttccttctatcagggaaacatttagtacgtaataggaatcctcatggtaaaacagccggaatgtgaatacctttccctggatttctttaaaccagatctggaccgggtggccccaggcctcctccgccgtttcatcatattccagtcctacgatgcccctgccggtaaactggtatatgcctgcatatatatggttgtagctcttttcttttgaaatatactcgtccttccggtcattattaaaatcaattttataaaaggtttcataaggtgaaacaactgagccgagccttaaaaactgattcagctcaatctccggatcttcatcacccgtatagacatcttcatcgtttgaacggtatgacaggtccgccaaatctgtttttatctcttccagataaccggtgacatcccctgcgtaagcagcgcggttatcatatattatctgccacataaatgattcaggcaccgcctcaataacggcgtcttgtccgccttccggtatcaggcggtgtatcattatattgtccagataacggggacgctcactccccggaaacggccgctccacaatatacagtccgccggaatgacagattatttttccgcccagatactcaggctgataggtgcttacataagtcagaccgcccgcagtctctcggtaaatatgcagatctcctatttttcctgtgacgctgtactgcagcaggagaaagtactccgtagggccaagggaaatccggcagacatactgggtgccgccgttaagcgtacgcctggcctggctcagatatgttccatatttacgttcaaaatccccctggtctgtctggtacatttccattcccagcccgcgctccagacgatccaaagccttgtccgccagtaaaccggccagaatttccgtgaaatcatcgggtatgtccgcacaattattttcaatggcagcagaagatccctgtacttttaacaaaaacacttctgccacatccggcaggttatagggaaacgcgctgtctctggacggatcctggtatgtaagcggtttatatatggagacatccgtgcccacaccaaactctgtcacacggatatcatccggctccaatacagccatgtaatccattaaaatcgtggtttggccatcctcctgtattctggcgtccaccagatacctctgcccggactgaatctcctggtacagtgtaaaagcagccgcctttccattgaaatgtttaaaccacatatcaaccagcctgtaatgattgtccttccatgcctccactgctgccggacactgcttaaaatccttatggtaccatttgatactgtgttcaaacggctgcctgtatcccggaggtgtttttgtaaatatctcatctttgccgtcattgtttatatccatgatatacatatgactccagtttatagcatcggcatcctccgcatcctccctataagccgtatcatcatacaaaaaaggccgctcctcattccgatactcccattcatccccataaaatgtatttttcgccctgtttgcatagataacgtcatatatgacatcatcgagataatcctgaacaatatggatatcaggatgctgctcattgcggtacagaaggtgtggttcggaaatacggaaggtccggttgaagcatatgctgtctgtaatgttggccagatgaaagatagtccggtcaagcatgtatatctgcaaattgacggttcctgtggaatcatcaaaacagcttgccccataataaaaggcagactcatattgaaataatgtaaaaaacctgacatcgtccatatactggctgttgaaaaaaacatacccattctctccctcaaccatcatatggacataggagatggttcctcttccgtccttttcaaaggctatcagctcatcggtcccgtcgccgtccgtatcacagcggtaacatgaatattccgcctcattttcgttgaaatcagttatcgccattttatttgtcatttcatccgtcatgtctaacagagacaggaattcatggtttgcaatccgaaaatcctgttggttcattccattcaggtattctatacaggcatccgcatcctcctggttcattctgtatttcaaatcgctgactaattccaccggaaaaccataacaatcatctgccggctccaaatcccccggcagcccggggaaacatgtattatcttcaaccagcattgacaagccgctgtctgtcagtgggggcacagacaattccggctgctctttcacaggctgtccggctgctgcgtccggtccggctgctgttccattcggtccgtcagccgccccaaaacaggcagtcagcaaaagagaaataatgcttacacttatgatcagtctataccccatggatacctcctggtattacctccagcgaatcctcagcactttcccgtcatatacgtatacggaatttccctgagacaatcctcctgtaaaatatcacggtcagcagagtcgccgcaatccatccaaagggccaggccatccagatacccgtgcttccgaaacgccctgtaaggatatttgccacgataatgcgcagaatcaaatccggcacagtggccagcacaaaataggtcatggctccggagccccggataatgccgtctgtcatgagcttaatggaaatcataaaatacatggggcttacgatgcgcagaaactccatgccggactctatggcccgggtgcttcccgcccccaggaacagtcccatcatctggcggctgaacacaaaatacagcagaaagaacgggattgtggcataaaaggacaacctgacgccggtcttaaaacccaggggtatcctctccctctttcccgctcccaggttctgggccgtatagctggacagacagcctcccagtgacatgaatgcgttgatggcaaaggtattaagcttgacagccccggaatagcctgctatgacagcggagccgtaccggttcacgatttcctggacaaacatatttcccactgacagcacactctgctgcatgatgctgggcactgcgatggctgctatctgtcccagcaaaacagcgctgaacagtacggtcctccggtcggttttaagggcgcccagacgtctggccagagtccccagggccaggatggcggaaaccccctgggcaataaaagtagcccatgccactcccgccactcccaggcccagccaggccacaaaccagtaatccagcgcgatatttcccagggacgaaccgatgagaaaatacaggggcgtcctggaatcccccagggccgtaaatatgcctgtacatacattgtagagaaacaggaaggtcagcccgtagacatagatcttaaggtacagctccccgtccgcgaatatgttgtccggggtatggattaaacgcatcatatccccgcagaaggcatatcccagcacggtcagaatcaggctcatggcgccgcaggcaatgaacgccgtgtagacagctgtcttcatcctgcctatgtcctttgccccaaagagcctggacaccaccacggaagcccccaggttgcttcccaccgcaaaggccatgaatatcaccgtgatgggataggaggcccccacggctgccagcgcatcctcacctgcaaaccggcccgcgatgctgctgtccgcgatattgtaaaactgctggaacatgacgcttataaacatgggcagcgcaaaccgccacagtgtctttttcggatgctccgccgtcaaatctgtaatcatgataccctctttcctcccaatgacaatttatgtaccattatacccttggtctgccataagggcaaccggaaatatagaggaaacgcaaatctgaaacgcaaagcacatatgaacggaccgcggagaaaagcactgacaaaatactgcaaatcagcgaaaaaaacgcccggggctttcccttttacaggatttgccccaggcgcagtcttttcacatgataaatccattagtggtggaagaggcggattcccgtaaatgccatcaccattccatactggttgcatgtctcgataacctggtcatcgcggacagaaccgccgggctgcgccacgtattttacgccgctcttgctggccctgtcaatattgtccccaaaggggaagaaggcgtcggatcccagggccacgtccgtcatagtgtccagccaggcccttttttcctctgcggtgaatacaggaggctttaccttgaaggtcttttcccatcttccatcagccagcacatccatgtaatcatctcccatatacacatcaatggcattgtccctgtctgccctcttgatgctgtccacaaaaggaaggttcattacctggggagcctggcgcagataccagttgtccgccttgctgcctgccagacgcgtacagtgcaccctggactgctgtcccgcgccgataccgatggcctgtccgccttttacatagcatacggagttggactgtgtatatttcagggtgataagggaaatcatcaggtcaatcttggcagaatccggaagctccctgttctccgtgacaatatcctccaaaaggtccctgttgatctccaggttgttatgtccctgctcaaaggtgatgccgaatacctgcttgcgctccagggcctcaggctcatagtccggatcaatctggatgacattgtaattaccgtttttcttggacttgaggatttccagggcttccggctcatatcccggagcgatgacgccgtcagacacctcgcgttttatgattctggccgtgtccgcgtcgcacacatcagacagagaaataaaatccccgaaggaggacatgcggtctgctccccttgcccttgcatatgcgctggctaacggtgagagttcacccatatcatccacccagtaaatcttcctcaatgtctcgtcaagaggcaggcccactgccgccccggcaggtgaaacatgcttgaaagatgcggcggccggaagtcctgtggcagccctcagctcttttaccagctgccagccgtttaacgcgtccatgaaattgatatagcccggtctgccgctcagtactgtgatgggaagctccctgtccccttccatgaagattctggaaggcttctggtttgggttgcagccgtatttaagtgccagttctttcataatcatacctctctccttatttatttttatttacgattcttgtctcatatgtgccggcggcaatatcaataaagcgcacgaacagggacaccttgttatcctcgttaaggctgttccagaccaaatccgtaaaggcgtcaatgtccccgcttatccccaccttcttaggctctccctcaaagctgggaagaggatttccgtcgtgcatgtaggtgtggataaaacgtccctcccccgatgccggcgactggtacgcataggtaaaacgcaggcaggaatccggatttccattatcgctctttaaaatggacatggcataattataattgccgttttcaatgtgcatgatgccggagatccgcggtgtgtaattaggcgcatccggctcgaattccctgcatcgcaaggactgctcaaaagtcatctggtggtccattccgtcgtagatagtgtcggtctggtccccgttggtcacaatggtcttgtttccaagaacccgcacaggggcatatataatcaggcttgggtcctccagcttggcggggtcaaatgcctgggtgcggattccttccccatcctccgcaaacacgcggttgcggctgttggcgcttctgcccatgataaaataggcggttactgcctttgttccgtcttctgatcgcccgatgacgattccccgtccgggataagcattgcttttcagctcctgttccagtgacatctgattcatactgattcctccattcggcttaataggtttctgaaacttaaaagagccggctcccggacacgcaaaaaaatatgcatgcccaggcggtcggctcaaaatagttcatggtactgcgtgctccctgtggttgctccactatccgccagtcacacgccctaccattaatatatatctttttttctaatattgcaacccttttttagaagttttactaatcaagggagtggacgaaaccagtctttcgcacctgtctgtttcccctattcattgcggatggctgccaggggactcagcttcatggcacgcatagccggcataaatccggcggccatgcccacaaagatggcaaagaccacggctgccacggaaagccagggcggtattctggacaggttgcctgtcagtccgttcatttcctccaggttaacaaaccggttgataaccaccgagataccgtaactgagcagaattcccacaatgcctcccatgaagccgataaagccggattcaatgaggaacatgttgcggatatttcccatatcacagcccagcaccttcataacgccgatttcctttgtcctctcataaatggacatcatcatggtgttggcaatgccgatggctgccacgaacagcgaaaccgctccgatgccgccgagaacagcctgtatcatgctggactgctgtttcgtgctctccatccagtccgcctggctgctgacctggaatcccatgtccgctatctgcttttgaacctccgggacatattccatatcgtccacaaatatctgtgccctgttataggtcagatagttaaggggctttccctttttgttggtgggctgtcccggtatcacggctccctttttaaacaccttgcgcagctgggctttcagtccgtcgatgtccgtatacacgttataggaataggaattccagtcatccggaccgccttccaccatgccggttgcattcatcatgtactttttcggcggtttcacaggagtctgtccgtcctctgacgagctgacggaaccatttctggtctggaaataagcgtccacatcgaaaatgacaaagaggggcttattcataaagtccacatccggcatctcgcccgtgtcccagtatccccggcctgtcttggaattataaaaattctgctggaccgtgttgcccaccaccatgcccatctctcccggctccggcagcctgccttcccccaggggaatctgctccagaaacgactggcttacgcccataagagacagatactgggcctcgtaggctccctggcgcataaccacattgatttccaggacaggggataccccggacacatggggcaggcggccaaactgttctatgacatcgtctgtgatgtaggtgggatccgaggatttgctgctcccgccccctccaatcatcactgcgttcccataggatgaaccggaatacacgttgatggtggtcaggcttccccaggaggaaatctgttccataaacatctggtccagtccgattcccagggataccatgaccacaatggacgccgtgccgatgataactcccagcacagtcagaaccgttctcagcttcctgcgtcttaagttgttaatgctcatgattacgagatcaggaaatctcatcgtccacatcctcttcccttgctgccttgcgtttcttcctgattcggatgacaaccgcagctgcaataccggcggctgccaccgcaccggcaatcaccaggaacttgtatttgccccagaaggatggggctgcctccgcctccatgctgcctgcatccatggccgctcccatatcatcccagttctgttccatctcctccataaccatgagggtcagttccttttccacgggttctgcgggaacaccgttttcatcctcgtaatcaatgcggatgcgtaccgttccctcatccagggtgggggccacacctgtcagcatggtatccacgttgcctgtttcaccaggcttgatgtttcccacataggcgtccgtggtcttgatggagtccgcctcaaaggtgacggtcacgttgtaaaggatgacctttcccgtgttgttgatgccgaacatgacattggactcagatcccacggttaagctgtccggcataacgtcaatggtgctggtgcttaaccgggcatactgctttacagggatgtccactacaatgctttcctctgcgttcttgaattcagggctgtcgtacttctccttcaccgtgatggcataggagcgctggtccactcctgccctggctgtaaacctggccctgacctcggtggtctgtccgggagccatattgtccaccaccagggaggaggtgcctgactccgtggtaaacacggcgctgtccgataccttctccgactccaggttaaagagaatgttactggcaggaaccgaggtggatgcattcttcatgttaagaatcagctcaaactcatccccagcatagatttcctccggcaccgtgtggtagctctccacaatcaatctggccctggtcctgtcgttggcgttaaaatcccccaggtcgtcctctttatccttggacgtgatatgtacgtaaaaagttccctcctctgtgtgcagatccccctcagagcttaagcggaaggtgatggtatatttgattggataataacctgtataggaatccttgcggattgccatgctgtagggagcggacacggtttctcccggctgcacgcgctcaaaggtgcggtcatagttgccgtcgttgatttcaaaggggaacttggcatcgtcctctgagagctgcatgctgaccgtcacatcctgggccgtggtctccctcttattgcggaaatttacggtgtaatccatgacattgggataaacgcccctgggagtgggctggttctctcccaccacaaagtaattgccttcctttttgtcctcctcctcgtctgctcctgatgtggatgaggtggaaatccatacattaatatagtctgtgtcagaaccaccgtcccattcaagcagtacagggatgctgtagtatccctgaagggcatcgcgccgcaccctggctgacagggacacgctctttacattgcccttcttgatggttcccacgttcttggccacaaaggtggtctccataatttcaaagggatagtagtcaacggagtaatccccgtttccccgctcctctatctgctggaactcattggtttccaggagactgatgcgcaggttctccatatcctcatccgtggccctgatacggaagggaatggacatggattttcctatggtccctttgggtgattttgtagtaaaaacataatcattttcactggcattggtgttgtagcccagtttataatcgctggccgccgcgctggacggatacatcccggccagcattgaggctgccagaaacactgtcaggcccctgcaccatttatttgctctcattctcattgcactccttttcctctgcattcccctcatataacgcttccctgccacctgtctcgattcccacaatcctgccgtccatgattcggattctccggtccgcataggaggccagattgttgtcatgggtaaccatgaccagagtctggtcctgctccctgacaatcttctgcatcaggcgcagcacctccatggtggtcttggaatccaggtttcccgtgggctcatcggcaaatataatctgaggattgaccaccagggccctggcaattcccacacgctgctgctgtccgccggacatctggttgggcatatgcctggcctgtcctcccacgcctaccaggtccatgtatttcctggcttccttaagcctctgcctcctggaaacaccccgaaaggaaaggggcagggctacattctccagagcattcatggtgtttaacaggttgtatgcctggaagatgaatcccaccttttcgcggcggaagctcaccagctggcgctccgtcatcttctctatatggactctgccaatctcaatctctcccttggtaggcttctccaacccggccagcatgttgagaagggtggatttgccggaaccggaggctcctacaatggcaacaaattctcccttatatatatcaaaatccagcccgtccagggcccggaccttgatatcgcctacccggtatatcttatataaattctttacccgtatgaccacgggcctggtttcttttactgtagggaccgacgacacggccagttgttcctctgccaaatccagcctcctttccagggcgtaaaagcgctccaatccagataacagcccgtatggacagactgtactgattttgttcagtatagcacagagaacgcgatttgttcttctgtttttctttaatcttcctttaataattccttacaccctatccgttttcagtagcaaatgtaacacgaaaacaggtaattgtaaagcagatcaggccagagcacagcaaaagaccggacttcgctgatcttcagcgggggcccggtcttggggggttattgaattttcacagtatggctcaggagtaccgttcataggacagcagatagccgtttttcttcagccatttcatatccagcctgaaaggaagtccgggaatgtccggcaggtaaaattttccgtccctgcgctgcacggtcacttccatgcagtccagtaccggctggttgcatacctccaggaattcctccatggcctcatcccctgccgtggcaatgagcggacaggcaagaaggggcaggccgcccgaagaaaaacgtatgccgctgcggaccgccatatcccgcacctgcatccactcccatactcctgcaaaggaggatgggaccggctggaaatggcggacgcctgcatccaggtaaggcgtgaacatatagtggttgcgcaccgactcgccggcagccacgggaacgggacagctctctgtcaattctccatagcctcgaaaatcaaatccgtgaatcggttcctcaaaccatgcgatattatatttctgtaccttatccgcaaatctgagggcctcccggaccgtaaatgaatggtttccgtcaatggccagctctgcatccggtccaatggtctctctcaccagcctgacacgctccacatcgcaatccagctttgtggcaaaatccgtacccaccttcatcttcacagtcttatgcccgcagtccataaaatgttccatttccccggccagatccgctccgcttaagtgtgtgctccctccgcttccatatacggtgacgctgtcctttaaagctcccaggaaccggtggaagggcatatctgcacgttttgccaggatatcggtgagaaggtactcaagctttcccacctcccctgccgtctctccgtcaaagccggaattacggcatgaccagtataccttgtgcatccactgtccaaaactctttttctccccggtcatgataaggggcagaatggtcctttccatgatggacgagcagggacacacgcccttgatgccgtcctccgtatagagctccacatatttgcttatcttggaatgggtaaacggaccaccggttgcgtcgtaaaacggctctttttggggtaccggcgcaagattgatgatgaatgcatctgtgaatttaagtaattcgccatcgtgcttcattttcgtctattcccatccttttggaagatatttaagcgtattttttatcatgtcatccaccagaagcctgatatcctcttcccggcagttctttccctttacaagaggatcgttcataaatgcttttaccaccttttccttatccggcttaagagctgcttccataatcagctcatggttttccagatggggcatcagaagttcctttaccttttccggcacagctcccgccaccaccggatagatatggtccttttcaaaaaccgcgttggtctccaccagcgcgcctgcgggcaggttggttatctggcaggccgtattagggatatttacattgctgacgacccttgtaaggccgcagagcgctttgattaaaaggattccctcttcgccggtaggttccagtttgacttcttcctgtccggaagccagcctgcggctcctgtccagtctctccttcaggtcattctttctccactgtaccgtggtcagaccgaatttccaggatgcaactgtctccgggtcattcaggtactcatttccgggcatgaattcagccagatgcctgtcccctgctgccgcaatcaggccatatcgcttaaacagatccatcttgacccggttggcacacttaaaggaggaattcatccagttttcgccttccacttcatatccctggtcaaaatgtgcgtcaatatagtcccggtaaacagggaacaggtcaatccccttataagaagcacttgaaaaccatgtaaaatgattgatacccagcacattaacatggatgtcatgccagtcaatatcctgttccccgcagctctcctcacagattcccttaaggaccttctgagttccaaagacctcatggcagcacccgaatgccttgatttccggaaatacatgatacagggtctttacgcacagtgacatggggttggtataattaatgacccatgccttcggcgcatattcttttatggccccggcaatctccacaaacatgggtatggtgcgcagggcgcggaccattccgccaggccctgccgtatcgcctacagactggtagattcccaggcgctccggaaggtgaacatcagactccatctcgtcaaaggtgccgggcaggatggaaatgacaacgaaatcgcagcctgtcagggcgtccttaagactggcgctggtctcaaacttccagtctcctttggcgtcgtcccgctgcataagccggctgccgattacctcattgttctttgccgcgtcaccgtcaatatcatacagacgtatggtaccgctaatctggtcttccagggcaaggtctgtcataaaggtccaggcccatcccctggaaccgccgcctatatatgcaatctgaatatccttaactttattatcactatacttcatagcttcctccttaatatgtttacttgaaatatacatgctctgcattcctgtacataattcgttccttttcttcccgggaaaatgcatcgctgcatgtgatgtactgaataaagtgctggtagctgtcctctttcagcaccgagggtatatccgttccgaaaatgagtctgtccgcccctgctatctcaattccatgcctcagatacctcaccgcattgggataggggtaggcgtcagggccgcagttatagggcagggcagccaaatcaaaccacacattgggcagggccagcttctttaatccttccacaagcttatcctcgtccctcatggacacggccagcagatggcagaccacaaacttcatgccgggatgctcttttatcacattcaaaagccggtccgtctgccagctctcactgccgcatttgcctatatcaatgacaaacaccagaccatgctcatccgcataatcatattcagccttcatgatatccccgtccaggggcagcgtaaagtggttggccatgagcccggagccggtacttacctcaaacttcacaattggaaaacccagctcttcaaacagatgttttcgtatctgttccttgcccctgcaaaaagggtcgtaggaagccgcggcacaaaaccggtccggatattttttcactgcctccatggaatagagattttggaaaccaaagtaatttccctggagcagcactgctttctccactccgttttcatccattttcctgagaatgtccccggcagtcaccactccctggctgaactcatccggaagcattcggaaccgctcccctgatgcatattccgccatgccgtttccggcaaagcgcaactctcctcctgcccctgttcccgcgatacactgtaccagatggacatgtccgtctattatcttcatttcatgttccattttcatcatcctttcaggccggaggtgctgatgccctcaaccagatatttctggaaaaacaggaatataaggatggacggcagtatggacaaggttgccatggcgaacatggcgccgtaatccgatgacgagcccgggtcgcaaaaaagcttcagcgcaaggctgacagggtacatgctggacttgctgacatacagcagggctgagaggaaatcatcccatctccacatgaaggagaatatgcaggccgtgaccagtgccggctttataagaggcagcatgatgcgggtaaaaatacctgcataggaacatccgtcaatcttggccgcttcatccaattccgtaggaataccgctgatgaagttggaaatcaggtacacaaaaaatccctgtatggcaaagaaatatggaaccgtcaacggcatataggagcccacccagcccagcttctgataccacagatactgagggatcatgagtacctgggcgggaagcatcatggagagcagcatggcagcaaacaggatgctcttgcccctgaatttgaatctggcaaatccgtaggccaccagggcggaggaggccacggttcccagggtggccaccactgagatgaagatggagtttttgaagaaggtggcaaaggaaatctttccaaagcccttccatcccgtggaataattgctgactataaatttctccggtatcaggctgcccgctgtggagaatatggtactgttctccttaaaagaactcatgaccatccatataaggggataaatcatgatgatgccgatgacgaaaacaatgatatggtatactgcttttttaaccactcgcttctctttcatgattaaagccctccttcatatacccagaaccgtttcgttgcaaacaggaacagggttatcagaccaatcacagccagcatgacccatgcaagggccgcaccatatcctgtgttgtagaattcaaaggactgcttatacatgtaaacagtatagagcagggttgaattcatgggttttccctgggtaatgatatagcactgggtaaaggccaggaagccgttaatcatctgcatgaccaggttgaaaaatatggtgggggtcagcaggggcagggtaatcttaaagaattttgccggtgcgctggcgccgtccacctccgccgcctcgtacagggactgcggaacctgttttaaggatgagaggaagataagcatggatgaaccaaactgccagaccaccagcaatatgaggacccatatagcggttctggtatccccaagccacgaaaagctggtctggattcccaccattcccagaagcttattcaccacgccgtccatggcaaacatcctcttccataagatggatactgccacggaacctccgataatggagggaaggtaataggctgccctgtagaaaccggacattttggaattttccagcaagagcatggccacaatcaaagcaaacagaagtttgagcggaacagacacaaatgcaaagaaaaaagttaccttcagtgttttaaaaaacgtttcatcctggaacatggaaataaaattcttaagtcctgtaaaaacaggtggtgaaagaatgttataatcacagaacgaataatacaatgaaattcccattggaacaatcatgaacagcaggaatccaatggtaaatggcagtgtaaacaggacaccggccacactttccttgctgagctgctgctttaatgccttcatagcctctcctcctcgccttatgaaaagagcgacctacaacagccgctcttttttaatttgctaatttttcttggactccataatctttgagccttctgtaaacagctgctggccggcatcctcagccgtcatctggccgtaacatacctgttcctccagcttgttcagaagatcgtttacctcgcttgaaccgtcggcagcaggcgggttgatctgggaagaattgtcagatacaacttcgttgataaacttaatcacttcctggctggtctcatccatcttaggcgcaatggaatctgccactgttgatgacagaggaatgcctctctctcccagaaggatttcattacattccactgaatttgtgatgaaattcaggacctttgccgcctcttccggatttgtgctgtcctttgtgatggcgaaaaactggcttggcttcagataatcggacttaacagggtctgctgaaggccaggtggttatggcaatctccacaccctcaggtgcggcgcttctgatggctgtgagctggttggtatagttaaacgcacaccatgacatggtttcaggattggaaccatacaccattgggtcctgctccacggatccgatggtcctctctgcgaagatggaaggatccacaacccatccgtcccttatgccatcctcatagagcttgaaataggatacataatcctctgctgttccgcccagttttccgtcctcaaacatgactacatcattggcgcgcaggaaatactcaatgaaattctcaccattgttatatgcaatgttggtcttatatcctgtcttttccctgatttccttgcagagtgcaatgaactcgtccatggtcatattgtcttttaccgtgattcctgcctcatccagggccgtcttgttgtacagcagcgcaggtgcattgatgccgttgcagattgcataaagtccgtcccctaccttaccggagttcagtacatcttcattacagtctgccacgtcgatggttccgttttcaatataaggcgtcaagtccaccagcaaatcattgtttacatactgctggatatacttgtaatccatctgaacgatatccggcatggaatgaccggcagcggccgtagccagcttgttccagtaatctgcccactctgaaaactgtccgtcaaaggtaactccgggattctgttgggaatacagctctaagatagcctgtgtacgctcatttctcacctgattgccccaccaggcaaccaccatctccgaaccatccccggatgcagccttttccccggatgctccttctgcctgtgaaccggccgcctttgtatctgcggtaccggaaccgccgcatgctgtcagacttgccgccgccagggcagctgtaagcacaagtgctaatttctttttcatgattgaaaacctccctcgttctttagttgcttttgatgaattgattatacctgctttttcttgtcaaaccaatcaataaaaccgatgtccatggttaattttccgactttttcatacagtttatgcggatgcaacttttccttgtcctgttgaaagatatggtatatattaatctaagacaggaaatttccactgaaaacaggagaaacttatgagatacctgaaacggataaaacatgattttgaaaatctctccatgaaaaacaaactgctggccgttgtattgtctaatgtggtgctgattcttctcatagcgctcatagggctgcgcatttcttccaatgcatataatgaacagctctacaaggccattgccggaaatctgtccttttcctcccagaccatttccagcaacttaaaaagcattgagaccctctcctccgtcatcatctcctcctctgtgattcaggattccctaaaccgcattgacagtacggatgatcccattatatggtccgaaaacaacccgcggatcagcgcagccatcaacaattaccagcaggcctacaaaaataacggtgtatccgctattgcgctgaataaccgtcatttccaaaacctgactaatttcgtggtcatcaacaatgcggatacggacacggtacagagcgcagtggacaaggccagggagcgggaaggagccattacctggaccattgactatgaccacagtctgtatatactcagcagaagcgtcaggaaggtctacaacctggagctggaccatctgggcgacctgctggtttttgtggatttggaccggattgtaagggatgccaaccgtgcagtaaccacctacggtgaatccagctatattctttttgacggggaccagctcatatacacttctgccgggattgacccggaaaccgccaacggattcatgaaacagacgggccagccctacagcatcatacaccagaacggacacagctattttgcagttaagaacaccattccctactacaactggacctacatcaacctggtcccctatgaccagattgcccaatccacagacatggcctaccgccttatcctggccatgctcattgtgggctttatcgctgccctggccttttccaggcgcctgacccgctacattttaaaggactttgaccttttaatacagaagatggagtttttcagcagcacggagcttaaaatgcccgaggtagaggtggactacagtaaaaggacggatgaaatcagcaggctgcaccagcatttcgataccatggccggccgtatccagtacctggtccagaacaattatgtgaatcagattttaagccgcgacgcaaagcttaaggcgctggaatcccaaattaacccgcattttttatacaataccctggaaaccataaactggcgggccaaggcattaaaggaccagcagatttcctccatggtggaatcccttggaaccctgcttcgcgctaccctcagcaacaaaaagccgcttgtttccctggattatgagatcggcctggccggaagctacatgaccattcagaaaatacgctttgaggaccggcttcttttccatgtggagtgtcccgaagaactgggcaaagctcttatcctgcccctcactatccagccccttctggaaaatgccatacgctacggtatggaggagatgatggatacctgcgaaatcagcatacggaccagaaaggaaggcacgctgctgattgtggaggtgtcaaatgaaggctctgtatttgaggacagccttcttgaaaagcttcaggacggtaccaagaatgcccacggctttggcatcggcctggtcaatatccaccagcgcatccagatgctttttggggattcctatggactgtcctttaagaaccaggatgagaaagctattgcaatcatcactataccatacaaaacagaggaagatgactatgcttaaattaatcattgcggacgatgaacgcattatccgcgaaaccatatccaccatcatcaattggaaggaatacgacatcgaggtggtcggcctgtgcaaaaacggaatggaaacatatgatatgataatggacgagacaccggatatcgtgctgaccgacatacggatgcccggtatggacgggctggaactgatccgcaggatttccggcacggacctgaatgtacagttcatcatcctctcaggctacggggaatttgaatatgccaaggaggctatgaaaaacggggttaaatactacctcctcaagccctgtaatgaactgcagatcattgactgtattgagcagtgcaagaaggactgctaccagcagaaaatcatggaacggattgtgtccgaccgcttcatggcaatcaacagcatgaaccacaacgttattttcagcatcatcaatgacagcatatgccagaaccggggctttccggacatcatccgttcctatgagtcctatatcgactttaaattcacggtctacaggctgtactatgtgtattttctgccctttgaacacctggaggagtttctggatgatttaaggctgtactgcagcgaaaatatttcctctgtcatcatacacggcgtatacgtcaataacaccctgcttctgttctttaaagactttgccgcaaactaccaggacctggagcgttttatctgccaaaggcactatccgggccaggccgtgaccctggaaaccgaatccaccctgtactccaatctggagcagcttctggtggtggttctcaaaaaaatcaggcgttttggtatgatttattatatcaataattttcatctgctctacacctgcaattacaacacccacatcaatgaatgggagcagctgtgccagtccatcctgaaccggcagccggattccatgcagaagctgaccgagctcataaaggatataaatgatattacctttttaaagcagattgccagcaacctgttcatgaagctcaccctgaacagtccttccctctcttccacctggctgaccgaactcctggtccggatagaaaatgaacagagcataacggacttaaaaaaccttgccattgaacgggtggaggacatcctgagagagcctgacagcgggcaggccgtcagcaccatgacacagcagatatttgactatgtaagccagaacctgcaggatgacaacctgacccttaaattcattgccaaaaactatctcttcatgaatgtggactatgtcagcaaaaaattcctgaaggaaacaggcaccaaattctccacctacctggcggacatgcggattaaaaccgccaagcagctgctggcctcaaagggtctggacaagatacaggacgtggcccaggaggtgggacttggaaacaacccccagtatttttcccagctgttcaagaaaaaaacaggtatgactcccagcgcatacattgcccaggtcctgggaagacccggcaaataaaaagcaattacttttttggcaacagtatgaactgctgccattttttttaaaagcctgtaatttttacttgacttataacgcattctatgtaagaatatgacgaggcacaaatcagtgccatatctggctggtccggctatcgcactggtagagtgtgaactatttcccaaattcaatattttacaatataatgcgcaaaggagactcccatgagacatttattgaatcccttagacttctctgtggaagaaattgatgaccttctggcccttgcaagggacattgaacagaatcttccaggatacgcccatgtatgtgacggcaagaaactggccacccttttctatgagccaagtacacggacacgtttaagctttgaggctgccatgctgaacctgggcggcaatgtattaggtttttcatccgccaattccagttctgccgcaaaaggcgagagcgtggccgataccatccgcatgatttcctgttatgctgacatctgcgccatgaggcatccaaaggaaggcgctgcatttgtagctgcccagaaggcccagattccagttatcaacgcaggggacggaggccatcagcatcccacccagaccttgaccgaccttatgaccatccgttccatgaagggacgtctggacaacctgaccgtgggcttctgcggggacctgaaattcggccgtaccgtacattccttaatcaatgccatggtccgctacccaaacgtcaaattcatactgatatccccgcctgagctgcgcatcccggacaacatccgcgacgacgtgctcattgcaaataacgttccttttgaagaggtgggcaacctggacgacgctctgggccagttagacattctctacatgacacgtgtgcagaaggaacgcttcttcaacgaggaagattacatccgtttgaaagattgctatattttggataaaaagaaaatgaaacttgccaaggaagacatgtatgtgctccatccgcttccaagggtaaatgaaatctccgtggaagtggatgacgacccaagggctgcctacttcaagcaggcacagtacggcgtatatgtgcgtatggcattgatcatgagattactggaggtgcagaaaccatgttaaatatcagcggattacaagaaggcattgtcctggaccacattgaggcgggaaaaagcctggacatctactatcaccttggcctggacaagctggaatgccaggtagccatcatcaaaaacgcccgcagcaataagatgggacgcaaagacatcattaaaatcgaaggcggcctggatacggttgacttaaaggtattgggctacattgaccacaacatcacagtgaacattatccgcggcgacaagattgctgagaagcgcgccttaaagcttcccaagaaaatcaccaatgtgattcagtgcaagaacccccgctgcatcacatccattgagcaggagcttcctcatatcttctacctggcagatgagaaggcagaggtttaccgctgccagtactgcgaagaaaagtacagtgaatataaataggatgattatgggacgctgcccgtaaatacatgaaaaggcagcccggtatcaaaatcccaaaggattgataccgggctgcccttattttattatccatatccaatcctggcgcatgtaccgtatccttccataccgcgccctaccgatacatttccctgtctgtttccttttttcctcccgggcctatgtagacagattcatcaaaggccagaattaacaggaatatgggggtaaggaaaataagccccagcgcataccccaccccatgtccgaaggaataggacatcttaacggatatcagaatatgcatgaccgagacgccgaaataagccagttgggccaccatggcgccgggaccggacacaaaccgcaaggacgcggcaatcaatgccatgataagccacaggacaaacatcctgttattccagaaaagcttatactctatataggtgccgtaaaacggtatcagggctttccatcctgcttcccctgcctttctgaatatcatccagtaagccaggatatagaggacaagcaccaccgcaattacaaacataaaaatcagcgacatccccatgagcagtatactcagttctttcaaaaaagcacccgcctttccaactatattccctacttatcggcaggcacaatttccagccagtagccgtccgggtccttgatgaaataaatgcccattcccggattctcgtagcagatgcagcccatctcctcatggtgcttgtgggtgccgtcaaaatcatccacatggaaggccaggtggaattcgcactctcccaggtcatatgcttccttcctgtcccgcagccaggttaactccagggtaaaatccgtcactccgtctcccaggtacaccagcttaaaggagccgtccgaagcgttcttctccctcaccggttccagattcagggcctctttataaaaagcaaggctcttctccaaatccagcacattaaaattgaaatggttaaatgtaatcataggtctctcccttctctttttttaaaaccggcctgcaccgcaggatgcagaccggcaattgtttcacatgtttaattgtttcacacgtttcattgtttcacacgtttgcttcgcatgtttagttcttgggagccatcatttccatgccgcccatgtaaggacgcagcacttccggtatcttcacactgccgtctgcctgaagattgttttccaggaaggcgatcagcatacggggaggagccaccacggtattgttcagggtgtgggccagatacttgcctccatcctctccctgcacgcggattctcagacggcgggcctgggcatctcccagattggaacagcttcccacctcaaaatacttcttctgccttggggaccatgcctccacgtccacagattttaccttaaggtcagccagatcaccggaacagcactccagcgtgcggacaggtacatctaaggagcggaacagatccacggtgttctgccacagtttctcataccacatgggactttcctcgggcctgcagactacaatcatctcctgcttctcaaactgatgaatacggtaaacgcctctctcctcgattccgtgggcgcctttctccttgcggaagcagggggaatagctggtcagggtcaggggaagctgctgctcaggcgtgatggtgtcgataaatttaccaatcatggagtgctcgctggtaccaatcaggtacaggtcctctccttcaatcttatacatcatggcatccatctcagcaaagctcatgacgcctgtaaccacattgctgcggatcataaaaggaggcacacagtaggtaaatccgcggttaatcatgaaatcccttgcataggaaatcactgcggaatgaagcctggcaatatcgcccataaggtaatagaagccgtttcccgccactcttctggctgcgtcaaggtcgataccgttaaaccgctccatgatgtctgtatggtaaggaatctcaaaatccggtaccacgggatcgccaaaacgctccacttccacattttcactgtcatccttgccgatgggcacggttgggtcaataatgttgggaatggtcatcatgattttggtaatcttctcagaaagctgtccttccttttcctccagctctgccagacgtgcggaattggcgctgacctcctgcttcacggcctctgcctcatccttttttccctggcccatcagcatgccaatctgcttggacagcttgttgcggctggcccttaaatcatcggcttctttctgtgtcgcccttgcctctgtgtccagtgaaatcacttcgtccaccagcggcagcttgctgtcctggaatttattcttaatattctgctttacaatgtccgggttctctcttacgaatcttaaatctaacatggtattcctcctggatttccttgatataataccttccaattctggacaggtattcctgtactgttaaagagtatataacattttaccaggaaataaaagccctttttctgtttttcctgctgctgtattcctactgctgctgtattcctactgctgctttccttccgtctctatgctgtaccggcatacgccgtccacataagtggcttccaccggaatgcgggccagctcctcaggagaggtctcaaagggattggctcccagtatcacaaaatctgccagcatccccggcgcaatcctccccttcacattttcctcaaaggatgcataggctccctccgcggtaaaggaatccagggcctgttttatgtccagggcctgttccggaaggtaggggcccacgtgatccttcaccgttgtcctggtgaccgcgcactgtatccccttcatcacatccggcagctccaccgggcagtcggagccgttggaagcatgggtggtctcataaagggtcctgaagtgatagctggatgccgccctctcctttccgatccgttcctccacaatatggatgtcataatccaggaaaatggactggaaatatgcgtggagggacagttttgcaaacgtatcaagctggtccggccttgtaatctggcagtggacaatgccgtgcctgtggtcctttcctggatgccgcgcaagggccttttcgtaggctgccaggatatcatccagaattccgtcccctatggcatggatggccacctgcattccctgggaatctgcatactccaccatgtcttcaaactgctgcctggtgaaaatggggattcccctggtggagccatcatctgtatatggctggctgagataggcgctcctggctcccagggaaccgtctcccagcattttaagcgggccaatcttaaaccaatggtttccccagcccgtgttataccctttttccacaaaggccttcagcccgtccagggtagtaaactgggactgttcatagaccctgaccgtcatccttccctctgcatccagttccctgtacgcctccagcactcgctcatagggaacattgttaaaagccagcaaatcatctgtctgggaggaggtaactccataacggttgagggctttggacgctgccagtatcatctcctttatgtcctctttggtgggctcaggcaggcatccgtatatcaggtccattgcattttcccggaatatcccgttgggctcgccgctttcatccacctcatagagcccgccttccacctggggcgtgtttcctgtgatgccggccagccggagagccatggtatttaccacacaggcatggccgcaggttctggtaaggcagatgggatgctccgtggatatcatatccaggtcacggcggttgggaaaccgcctttcatcctcaaagtaatcgtggttccatcctcttccccttacccaggtgccgggctttggggactgctcccggataaattccttcatatattccttcatccctgacagggactgggtgtgctgtgacaaatccgctgcgccaagggcatttccatagttcaaaaggtgcatgtgggaatcattaaagcccgcgcacacaaatcttccctttaagtcctttacctcatctcccggttccttcatggccagggcgtcttcgtcgctgcctgcgcatatgaatcttccatcctccaccacaaaggcccggcacaggggaagttccccagtgtatacggctccattccggtatattgtcctcatgtcatccctcccttattctgccttctccagcttctttttatcctcataaaacagcggcatatccttatcttccagtgttccgatgttcatatagcgggccttgtaatccttcagaagcctgaaatatgtgcctgacagtataagaaccacgaacacattgatgaaagtcgggataccgctggtgatgtccaccagggtccatatgctcaaatcacccacatgaatcaggtaaagggtgagcaaaaaaggaggaagggcgtaaaaatacttgaacatgcgcagcagccatttcttcaccgtgggatggttcatagccagatggcgcagggttgcctcatagtacacataccatccgccggaagtggtcacggagaagatcaccatggtggccgtcatgaacacagttccgaaaaatccaagattgtgctggaacacgttaagggcaagggttgcattggttgccccggaggtccattcaccggtaatcagcacgctgagagccgtaatggtacacacaatgaaggtgtccacaaatacctcaaaggatccccagagcccctgctccacgggatgacgtgtcttgctggaggcgtggaccatagggcttgtaccccagccggcctcattggaataaacacttctctgcataccggtggcaatggccttggacaccgtgactccggcaaacccgcccatggcagctgttcctgtaaaggcctgggtaaagatagagacaatggtgggaatcaggttgccgatgttcagcacaatgattaccaggccgaatatcaggtaccccagactcataaccggcaccagcttcacaaatatcttgcttaaattctttacccctctccagatcagggcgtagataaacaccactaacagcagggacgccagctcctggggaattccaaaggactgggccagcacttccgatgtggtaaagttggaggcactgataaaaaaggtggaaaagatgccgaggccgaacacaaaagccagcggaagccatttcttaccccaatggcgctcctccccaagtccgtactccatgtaataggtgggtcctccgtatggattcccctcctcgtccgtgcggcggtaatacacggccagagtaacctccacctgcttaatcaacatgcccatgaaggctgtcagccacatccagagcacggctccaggcccgcccgtggtaacggctgtggccacgccggcaatattgccaaagcccacagaaccgcctacggccgttgcaatggcttcataagggcttaaaagacccttgtcattttcatcggtgacatggtcctttctcaggatacatccaagagtccgtttaaatatgtaccccagatggcatacctgaaaaaatccggaacggaccgtcacgtagatacccgtaatgataataagcgcaatcagaggcggcccccatatgatttcaccgtttaaccagtttaaaaattctgtcattcttttacttccccctattggttctggattgcgatatcatggctgtccggcacggtacacaaaaagcaatgaccccaggccattgctttccataatcacatatctgcttaagaaaatccagccaatagcgccaccactttaaaaagtgagagtacgcagcctgttagactgcatcccaacacattccgccggcagacagaatccgtttcggcagtaatccctttccctgtgtgctccggcccgccggcctccgggacaaaatcccctctgtccgccaccctggggatggcatccattatcacacagatactaatgcttactgcgcctctatcgcatcctatattttaatattgctttaacatcatactatttaaggctgaaactgtcaacgtttttcgacatttcctgaccgtccctgactgcctgcgctttctgcggttgtcctgcctcatgccttctgtccactgcgcggaccagcacatccatcagctcctcaaagcacacgccattggcaatggggatgtcaagctcctccgacctggcgatgcaggcttttacaaatgaggcagccagacgcacagcgctgtccagactccatccccttacggcagccgccgacaccacggaggagaatacatcccctgttcccggccgctcatggcccacgcgcctggttctggggaaagctgtccgctctccctcagccaccacattcataatatagccgccctggttcacacctgtaataaccacgcattccggccccatggcctggatttccccggccagctgccccagctctttcctgctccatccatcctttcggtaggtccgtcctgtcaggatacacgcctctgtcagattaggagtcacaatatcacccatggataccagctccttcatgcggctgcacatggccggcgtataggtggcgtaggtctccccgtggtctcccataatcggatctatgattacctttgtgtcctcctgcccgaactgccgtataacatccatcacaatctcaatctgcgcctcggaacccaaaaagccgctgacaatgccgtcaaaggtcagctccagctccttccacttgtgaatgaactcccccatcttctccgtgtagtcgtcaaagaagtagaccgggaatcctgtgtggttggacaaaatggaggtggggatggggcagcactggaccttcatggcggataaaatgggaatagccactgtcaaagaacagcggccgtatccggataaatcattaatcatggcaatctttttctgtcggtaagcactcatgtcaaatctcctgtcatctgaaccggtcaaagagtccggatcttataagtgtactgcgaaggggcatgtagatgactaccgccgcagcggcagacgtcaccgcattgatggaggtggaggcaatgttccatgccagcaccagatccgctgccggtttgcccaaaatcgccagcttgtaaaaatatcccaccaagggatcaaatatcacgttgaacagcagaccgcagacagaggccgccacaacaaagcggaacacatgcctcttgtcagaactctcattgattctgccaatcttgtgggccaccaaaccggttatcagaccgatacacagcttcagcaggaaggttttcggcgcgtacaccacatagatggggtcaaacaaatccccgatggtcattcccagggccccgcctaatcctccgtaaaagcctcccaatatcagggctcccaggacgcagaccgcattgcccagatgaatggaggtggcgtctcctccgggaagggtaattttaatctgcaaaaatgtaaataccacataggataatgccgcaaacaggccggtcagggccagcttgtatatacggctgtcttccaggcccctgtggcctgctgtcactgcactggatgtcttcatacaaattctctcctcatattgtagatttcttaccggaacaactgcattcgttcatgccacctatggtatcactaaagtggaatgttttaaatatccagtttgagaagttttggccagtccagttctgtggaagaaaaatccttttgtccgggttgtcaatcgtgggattccaccacaatcagcaccccgtccgtaaaggtaatggcgccttcccccccctgaagttcattgctgatgcagagacttgtccctatctcaatgtccttttcatggagaggatatttaaaaccggtgagggtaatgcccctgacctcctcagtaagagggaggaaggaaatatatttcccccagatctcacgcctcttaaacgtccgttccttgtcaatgagatagatacggttctggctgtccaggatatatgcctctattcccttttgcaggcagggaaataacagatggatattgcccagcatatggtccatgcgtcctccggtggctcccagcaccaccacctcggtgcacccggtggcctgggcctttaagagggccagctccgtgtctgtctcatccttttccggctggtgggtgtcccatacaatgtgttccatcctcctgtaatatgccagcacctccggcttcaccgtatcaaaatcacctactatcatatccggttccagccccagggccttcacggcctccagtcctgcgtccaccgcaatgattttatcaaaggtttcctgtcccaaaaaagaaccggcgaaggacaggtccagttttccgccggttataatcaaacaacgcttcatttctcatattcctttaaaatatccatgaattctctggttctggcagaagggtcccggccaaagacagcggaaccagccacaaatatattggctcccgcctctatgatttcccggacatttcccgcgtttacgccgccgtccacctggatgtccgttttcagtccctgctcattcagcatgtttttcagttcgcgtaccttgtcaagggtataagggataaacttctgtcctccgaaaccaggattcacagtcatgataagcaccatatccagctggcccaggatacactccagggaacgcacaggtgtggcgggatttaaggccacgccggccttcagcccggcttccttaatctggttcaccacacggtccagatgcgtgcaggcctcggcctggactgttatgatatctgccccgcagtccttcatatcctccacatagcgtcccggctcctccaccatcatatgcacgtcaaaaacagccctggtacatgggcgcagactcttgatgaccggcataccaaaggagatgctgggcacaaaggccccgtccatcacatccaaatggagatactcagcccccgccccgtacacctccttcacctgttctcccagacgggtaaaatcagccgcaagaatagacggcgctaatttgtaatacatctctagtacctccttttatttttcaggtcctcatacatgaggatgtaattgtcataccggctgcggctcagttctccccgtttcagggcttccttcacaccgcagacacgctctcccacatggacgcaccccagaaatttacattcttcctcataaggcccgaactccggaaaataatccttcaattctcccggctccagacagtcaataaacatggagctgaatcccggcgtatccatcatgtaggtattctcttccacataaaacaattcagaatggcgggtggtatggcgtcccctctcaatcttgcggctgatatcccctgtctccatggcagcctggggctggatgcagttagtcagtgaggattttccgacgcctgaaggtcccgccaggaccgaggtttttcctctgagaaattttctcatttcctccagccccgtatcctggtaggtgctgacaaagtggacttcataccctgccctctcgtaaatggcgcggtacttatccacaagcccggcctcccccagatccaccttgttaaaacagatggtgaccggcactccctgaattcccatcatcaccagaaagcggtccagaagattcagattgggttccggatgggtgatggcaaacaccaccagagcctggtccacattggccaccgccggacggatgaggacgttggagcggggaaggatggcatcaatattaccttccttctcctcctcgtccaatacagaaaactccacattatcccccacaaggggtttgattttacggttgcggaacacgccctttgccttacactggtacacatggttcctgccgtcattgatataataaaagcctgcaattcctttgattatcttacctgtcatatactcctcttatcccaccggaaaaaatgccaccggataggacttgattactgttaaattgtctgcatccaccacttccaccatgccgctgtccacaccgtacgcccccttgattctggggaataccacgggtacggtctgggcgccaacaaccagtctcggactcataagggttgtgtaaacggaagctccctcatcattggtctggttcaggcgaatcagcacgcgcacgctgctggtctgggaagccggtcctatatagttgcttaaggagcatgcctcgtcaatggatccgatgtaatagcgttcatctgccgcctgggtctgtgcaggctctccgctgaccacataatccaccgcagtgcctgggggaagtatggtacccggcagctccgactggctgataatcaggccttcctccaccgtatcgctggcttccacggttacattgcctgtcaagagtcctgctcccgccagaagggcatccgcggatgtaggagtctgtccctgcaggttgggcacacggccctccacgttctgtgagcccttgctcacatagaggctgacgctctctcccaccttcaccacctgggggctgaaacggatcacattgccctttatgacggtatcactgttctcctccctgacatctgcaaccagccctttctgctccagcagaagcctggcatcctcacccgtcatctgagtcaggttcagggcatttaagtctaccttatcgctgcccttgctgatggtcactcccacagtactccacttcttcaccacagtccctgccaggatatcctggcccatgacctggccttccgtatagttatccgaatactcgctgcctgtgacctccatcaccaggctgctctccttcagtttttctctggccatatcctggggcagtcccaggacgctgggcatatttatctgatcctccgtgctgatatccaccacggtggtggagtcttcggtggtcatggcaacggtctctgtggtaggcttattgctgccctgtctgaaaatcccggtgagccgagaaaatacgaacagcaccaccgccacaatgatgatggctgccacgatgccaaaggccgtgataatgcgctcaaactgggtacttacatcatccccctcattctttttcctggtatggatgcggccttcttttttgcgcggttccctggcccggttcctgtcctgatgcccggactgttcctcctccggttcctccagggcttcctcaggatagctcttcctgccttcctggatgctgttaagctcatcccttgtgatgggcctggtcttgccaaactcatcctcttccccgtccttgcgggcatagatgtctgcgtccgggtccatcagggcagcccgcaggtcctcaatcacatccgtcacgcaggcatagcggcggtccggacgtttctgggtacattttaatatgatctgctccatggcacgggacatgtccggcacgtactggctgggcggtgtcaccggttcctccagatgggccagggccactgtaaccgtgttatccccctcaaagggcacacgtccggttaccatttcatacatggtaataccaaaggaataaatatcgctgcgctcgtcgcagtagcctcccctggcctgttccggcgaaatatagtggacagaacccacggccgtagcgttcatggtctgggaggacacggccctggcaatgccaaagtcagccaccttcaccttgccgtccctggatataatcatgttctggggcttgatgtcgcggtgtatgatgtgctgttcatgggctgccgcaatgccctgccccacctgaagcgcgattccaatggcttccttgctctccagatagcccttgttctctatataattcttaagggtgatgccctcaatcagctccatcacaatataatggtacacatcctcgtccactacatcataaacacttacaatattgggatgggacaggcgcgccgccgactgggcctccatcttgaacttgcttacaaaattctcgtcaaaggcaaattcctcttttaataccttgatggccaccaggcggtccagggtatggcaacgtgccttatacaccacagacatgccgcctgatccaatccgctccagaatctcataccggttctggagatatgttccaggagttaacatacgcctgcctcccttcctgacggatttacaagtaccaccgcaatgttatcaatgcctccctgacggttggcttcctctataagaagggctgccttttccttaaggcttccctctcctgtgatgatttcatacatggactggtcctccagcatattgctgagaccatcggaacagagcagaatataatccccgccctccagatccacctcaaagaaatccggctccacttccctgccgattcccagagccctggtgatgatgttcttgcgcctgttataatcctcgctgcctcttctcatctgtccgatggccaccatttcctccacataggagtggtccctggtgacctgccggatggaatcaccgtggatgagatagagacggctgtcccccacattggccacatagaggatattgtcctccaccacaccggccaccagggtgcatcccatccctttcagttcttccctttttagtgattcttcatacagcatcccattcactgtctcgatgccctttttcagctgcatgacaggagagccgtcccctgccctgtttatgtatatcaccagattctcaaccgcgaaccgcgaggcataatcgccggccctgtggccgcccatgccgtctgccaccagaaacaggttgggcagggagcccaccttttccggtgaggaataaatgtaatcctggttcatggttctgacccggccagtgtctgtcaaagcatatgcttccatggtcatccctctccttccgtgcattggggtgctgccgaagcttccttatagcttctgcgcagctggccgcaggctccgcctatatcccggcccatttctcttctaatagtaacatttataccgtttttttcaagaagatttttgaaatcctgtatggccttctggcctgactggacgtaatcccgctccttgatggggttgaccggaatcaggttcacatggccgtgctggtccttgataagcttcgccagcgccctggcctcatccagattgtcgttgacaccccggaccaggctgtactcaaaggtgaggcggcggcctgtcttttcataatagtaatggcaggcctccagcacatcctgtaatttatagctgttggctacaggcataagggtttttctcacttcgtcattgggcgcgtgaagggaaagcgccagggttacggccaggccctcctccgcgaatttacggatgcccggaacaattccgcaggtggagatggtgagactcctctggcttatattcagccccttttcatgggaaaccagccgcaaaaaacggatgacattgtcatagttatccataggctcccctgatcccatgaccactacattggaaacacgttcccctgtgatggactggatcctgtatatctgttccagcatctctgaaggacgcagattccgctccagaccgtccagagtggacgcacagaaacggcagcccatgcggcagcccacctgggatgaaatacacacggaattgccgtgatggtactgcatccacacgctctcaatcacatggccatcctccaggccaaacagatacttcctggtgccgtccacctgggaaacacgctcatccaccatcttcagacaggtaaggctgtaattctccttaagcttctgcctaagcggtatggacaggctgctcatatcgtcaaatccttctgccagcttcacatgcatccagtcataaagctgttttgccctgaaagatttctctcccagggcagccatctgtgctgtcacttcttccagtgtcatggattttatatctttctttccgttgcagtccaataaatccagcataaaaactccttccaaaacacgctctaaatcccctccgggcctgtttcaccctccgcacgtctgaatacgctgatgaaaaacccgtcatagggatgcacccccggcaggaactgaatccatccgtcctttaacgagggctcctggggcagtccgccgaaccggtccgtcaaatccaccggcacaagtgggaaccgttcccttaaccaggccgcattgtcctggttttccagcctgtcaatggtgcaggtgctgtagcagaggagaccgcccggctttacgtactgccagacaacagacagaatctcccgctgaagccctgccagctcctcaagcttctccggcgtcatgttgtacttgatatccggcttcctcccaatgattcccagaccggaacagggcaggtccgctatgacaatgtctgcctttgccatggctgacggatctgtctccagcgcgtcccacaccagggtcttcatgttggtcacaccgcagcgggccatattttcctcaatcagggctgtcttctggtatgtaagatccctggcctccaccatgccggtgccctccagcttatccgccagatggagactcttacctccgggggcagcgcacacatctatgatataactgtctttttcaggggacgcaatctcccccacaaaggcggaggtcacatcctgtacctgtatccagcccttcctaaaggcatccagtccctccagataatcgtacccgtcaatggctatcatggactccatgaaaggcagctccctgaccgatgtcccctgtgccttaagggaggccagaatgctctcccggtctgcccgatgcaggttgcacctgacccaggtaggcttatcctcaagaaaagaggcggcaatcttctccgccttttctttcccaaattccttttcccacatggcgtacatccactcaggaatactgtaccgcagggagggagtgtcaaaggtcagattctccttttccctggaaatggtccgcagcacgccgttcacaaaacccttaagcccggagaaatgacgcttcaccgccagcttcaccgcctcattgcagacagcggaatcaggcacgcggtccatatataatatctgatatacgctcatccgcaaaagactgcggatgaacggcttcatcctgtttatctttgtcttggaataccggtttatgacctcgtcaatctgtatcaggtattccagtgttccttccacagcgcgtgtgataaaggaacggtccgccttacccaggtactggtacttctgcagggcctggttcagtacaaggtggacaaaagcgccctgttccagtacctccgtcaatatatccaggacaatttcccggttttccagtcctctgtctaaggtctttgccatctgaattttctcctctcagggcctgtctgtacataagtccccataaaatctgccgtacccggcgccttaatcattcctgcggttgccgaataatatcagcaggcggagaagctgaaggatggaagcagccgctgccgccacataggtaagggccgctgcgttcagtacctttctggtctgtcccacttcctgtccggccaggatgccggtggaatccaaaagagtcaccgccctgtgggaagcatcgtactccacaggcagggtcaccagctggaacagcactgccaggcaaaacaaaaggatgcccagattcaacaggacagagcttcctcccagtaaaagtccgatgataatcaggggccagcaaagctgggatcccagattagccgccggcaccagggccgcgcgtatccttaagggcgagtaatcattggcatcctgcatggcatggccgcactcatgtgccgccactccgatggctgcaatggatgtggaattatacactgcgtcggacaggtttacggtcttgcttctggggtcgtagtggtctgtcaggttgcccggtacccggcgcacggtcacgtcatagattccctgattggcaagaagccttttagctgcatccgcgcctgtcatgccgcacatgctcctgacagcgctgtagcgctgatacgtggagttaagcttggcagaggctgccatggatatgactacgccgatcaatatcagtacataggttgggtcaaaataaaacatagggtaaaacatcatcaatcactctctttctttacaaacacgtcccccgccgggatgggatatcctcggagaaatgctggggtatccatgcgtttttttccttccatctgaagctccctgatggacagcaggccgccgccggtgcagaccaccagtccccgcttatccgaacacactaccgtgccgggagcagtccccgtttctgcgggaacacctgattcggacagaaaatctgccgcctcccggcctgcaatcacatctgccgcccatatctttattgttttcccattccacatggtatatgcactgggccacggatttaagccgcgaatcaggcgttcgatggacacggcgccctgattccagtcaatgtccccaagggactttgtcagcatctttgcatagcaggtgccttcatctgtctggggtgtacggaccagagtgccttcctccagcttcttaagggtggataaaatcaaatctccgccagccatggaaagcttgtcatgaaggctgccgccggtctccttttcctctatggggattaccgccttttccagcatatcccctgtatccaggcccacatccatcatcatggtggtgatgccggtctccctttcgccgtctatgacacaccactggatgggtgcggcgccccggtacttgggaagcagggacgcgtggatgttgatgcagccgtacttcggaagctccagcactgcctttggaagaatctggccaaaggctatgaccacatacacatccgcttccagtccctttaggacctccacaaaggatgcttcccgcaccttcgccggctggtacaccggaatgccgtattccatggcctgtattttcacaggtgtcatctggacttcctttcccctgccctttggcttatcgggctgggtgaccactgcaattacctgatgaccggcttccaccagggccttaagggcaggcacggagaaatccggtgttcccataaatacaatgcgcataaactatactcctattctatgatttcttcctcgtccgcagccgtatccaccagttcgccttccaccagctccacatacatctgtccttccagatgggcgcattcatggcagatggctctcgccagcagcccctcgccttccagctcatagggctccatattttcattaagcgccttcaccttcacgtagtttgggcgggtaacgatgcccgacttgcccggcaggcttaagcatccctcgtagcctgtctggctgccgtcggtggctgtgatttcagggttaatcaggacatactggttcccgtcgtccacatcaatggttacaatctgcttcagcactcccacctgcggggcggccagaccgcatccgttggcctggtacatggtctcaaacatatcttctatcagctccatggtgcggtcattcatcgccttcacgggcttgcacttctttgtcaaaatttcgtctcccataattcttatctgccgaactgccatctcttttcaatctccttcatcatgttaaatcgtactgcacagtcagtccatcacggccttctaaccccttcaggccctcttccgtcattttcctaatctgtatcagtatatcataattttcatgcttaatatataaaatttttctataaatatcattaactttgtataccgctgcattgaccggtcctatgagccggaaagacttgtatccctgtactttttcccgctccatgcggtccgcccactgctgcacccaccctgccgccaaatccgctgtctgcgccagggtcccttctgcaggacacgccatctgcacggtgagcagggccactgcaggaggataacccagcagccttctgtaagccatctcctggctgtaaaagctctcataatcctgggtggccgcggtgcgtatgctgtaatgatccggctgataggtctgtatcaccacatttccggccagctgccctcttcccgcccgtccggctgcctgggtcagaagggcaaaggtctgctccccgcacctgtagtccgaggcataaagggataaatccgctgccagggcgcccaccagtgtcacctttgaaaagtcatggcccttgacaatcatctgggtgcctataagtatatccgcttctcccctggcaaaggaggaaagaatctcctgatggcctcccttttttgaggtggtatccaaatccatcctgagaatcctggccttggggaaaagctctgccgccatggcctcaattttctgggtcccggtgccaaaaggcgctatatacggagaaccgcagacaggacatttcttgggctggggaatggagtagccgcagtaatggcacatcatgcgcccatcccggtgcagtgtcaaggtcacgtcgcagtgagggcatctgacggcctcgccgcaggaacggcaggacacaaaattggcatagcccctgcggttgataaacagcatgacctgctctcttttctccagccgttcctctatcagcgccttaaggcgcctgctgaaaatagagcggttcccctcctttaattcttcccgcaaatccacgatctcaacctggggaaggcaggcatcctcctttgccctctccttcagggtaaatagcccgtactctccccttaaagcccttgtgtaggattccagggatggggtggctgaccccagcacaagggaggcttcgttcatctgggcccgctttgcggccgcctccctggcatcatagcgcggggacaattcgcttttataagcattttcatgctcctcgtcaataatgataagccccaggttttcaaagggggcaaaaagggcggaacgcggaccaatgacgatgtcaatatcgcctgtcctggcccgttcatactggtcgtaccgttccccggcagacatccgggaattcataaccgacacccggttgccaaaacggctgtaaaaccgcatcacggtctgccaggtaagggaaatctccggaatcagcacaatcacctgacgtccagccgacagcacatgggcaatgagctccatgtaaacttccgtcttaccgcttcccgtcaccccgtgaagcaaataggtacgccggattccccggtcgtattccccaatgacagcatccgcgatctcccgttggaaaggattcagttcagggggagcgccccacagtcctgattcctgattatccgaaacagcctggttcctctcccggctgcccatgagctgcttcatttcctccaggggattccggtacttttccaccacctccacggcaatgacgccggcctccaaaagaggcttgatggctgacggcgtaaggttcagccggttcatagcctcctcatacggaatagcgcttgtcagaagcagcgcctctaaaagccgcagctttgccttatgcttctttctcccggcttcctccgccagttcctcaagcacacccctgcccaccagggtacggattctccgcttgggagcctccctgaccttttgttttacaggcaggactgtttttaacgcctgattcatggtggagccataccgctccttcatccaccaggccagccaaataagctgggactccgcagccacgcttccctgcacaatcccagccacatcttttagtttatggacatctatctgggcctggtccgtcagatccaccacatagcccctgcgctgtctgtttccctgcccaaagggtatgcggacctgctgccccacctgaatctttccctgaagctcctccggtattctgtactggaatgtcctgtccacattttcatgggaaatatctatgataatactggcatatctatgcgccacttacgtcacctgtctgtcttgttattttgtacttggttattatacatgagaattgaataaaatgcaaatgggggaagggacgcaaacggggatgggggatcgcgtccgtgagagggagacggacgggggcgggagtgatggttttcgcgatggcagggactaagacgccggggcgggccagaggggaggatcgcgaaaactacgcagaactcttgatgagttctgctccgtgttcactttgctccgggcgttgagcgccctgcgcaacctcccctctggcccgccccgccgcctaagtccctgcgaaccgctccaaattcactcccgcccccgtccgcctccctctcacccactgctcttttgacgtttgctggttcttccccgccaagggagtgaaagatactgctcgctgggagtattctttattgggattggcttgttttggggcttgtttttggggggagtggtttgtttttggaatatgtctattgcatggctggtgatgcctgtcaggtctttgcgttcgcaggtggcatagtggtattttaagtataattggaatgtttcatcatccattttgtcgattgcttcccggatgagcagcgcacagccgtctgatgctgcgtaatgcaggcgtgttgtcgggaatatggacatcaaatcgtcgatgtcttctttacgtacaagttcaaacagatctttgggctcggatttggcggcgaatgtttcggggtccagcaggccgttttttatgtattcggctgcattgatattgccgcggttgaatccttcgtccagaagacagccgtcggatatgacgtatgctgcaaagatgatgccgccctgttttgtgacacggatggcctcgcccagcgcctggcgcttgtctttttttgtgtatagatggtataagggccctaacagcagcgtgatgtcgtattggttgtccgaaaaggctgataagtccagtgcattgccctgggtaattgttatatgttctgcctgcagcgtatgcctgcaaaatacttctatgttatggggaaccagttctactgcgtcaaccgtatatcccagacgcgccagcgcatgggaataccggccggttcctgctccgatttcaagaacacggctgccgggttttatgtatttttctatgtagcgcatggttgtaagaaattccacggtcccatgccttgggctcagccggctgtcctcgtcatagttattataataatcaatgatgtatggatttgttttcatatcgcacccctatgttatattgattcggttataccgctaacggataaggtccagtccggttttttctgtcttatgagagctgtcagcatgtttgcagccattttttctatatggcttctgtccagtgttattttttgcgccgctgctaaaaccgctatgccgtgggaataaagaaataaatctataaagattgcctttgcccgctccggctcgattccaatggtatcagaaaataccctttccctctccccgttgcctgcctccatatagaaatcctttggctccgccatactcaaatccatatggtttataaacaacagcctgaacaaattcgtctcctctctcgcaaactcaatgtacgaaagcggcagaaccagacatggatttatgtgttccaaactgctgtaattctccacatactgactgtaaaactcatatgcaaagtcaagaaattcctttcttaattcctccatgttctcataacatgtaaaaataggccgcgtggaacattgtaatctgcccgaaatacttctggcattaacagactcaaatcctgcctctcttgtaatctccagaaccgtattcagaatcatctctttcgttatctttgctttaggcggcatcggcttacctcgctcattatcatattatatcagcaacttaacacatgtaccatcacatgcatcccaccagttacaccacatccgatatgtcacaaaatttgtgcaaaacgttatgcaacaaatgttatacaactattgttacataacaatcaagaactgtcaagccctattcaatcttttataatttatttaatattttataatttatactcccccttcctcactaaaaagtgcggttcatccatccgcaatggaattaaccgcacccaccagcaaaacaataatcttctattttaaaaagcatcaggaaatacccagaggaaggtacacccatttctctgattgtgcagtgaagtaccgggagacctattatacgtagtgggtgggagcaagggggaaggaagctggggatgcatctgcaggggcttagtcggtcttagggggtggaaaaggcgttaagagtcagaccgcacagctgtctgagcgcagcgagtttgggcggtctgactcttgctttcagccgttttccagccccttagaccggacttgccccgaagccgtatccccaggttccttcccccttgctcccacggacgcgattccaccgcctcccgcagcctcccactcccaatccactcactccacaacccccgctctcctctcaaaccccttaaaccttcccgaaaacatcaatgccctgaatatccagtcaatgaacatgccgtaccataccccggaaagtcccaggtcgaatatgtatacaaagaggtatgcaaacccgatacggaatacccacatggagaatacggacacggccatggtgaatttggcgtccaaggaggccctcagggcatgggggatggtgaaggccaggggccatataaccatggctatgctgtggatcaggatcagctcacgggccataagggctgcctggggggacagatgatagattcccaccagcggaccggaccagatgaccatggctgtgctgaatacggccaggattccatagaccaccataataagggatttggtgtcgctcttggcctccttcagacggcctgcgccaacgcattggcccactatggtcaccagtcctaagccgatggcatttcccggaagatagagcacggtcaccaggttgctggccacggcaaagctggctatggatactgtgcccagggaggagacaagactctgaaggaatatcttgccaaactggaacatgccgttttccagcccgttgggaattccgatggacaggatattctttatcatatggcggtccggaatcaggaacttccagctgttgagacgaatggtattgttccggttctgtataaggacaaacatcataaaggctgctgtcacacggcttatgagggtgggccaggccactccggccacacccatcttaaggccgaacacgcagattgcgtttcctataatgttaatcatattcatgacaaaggaagtcatcatggatacctttgagttgcccatggaacggaacagggctgcgcaggcattgtagagtccgataaagggatatgacagggctgtgatccagaaataggtctgggcgttgtccattacatcctgttccacttttccaaatatacctcccagcaggtggcgtccccctgcaagagctgtcccggcaatgatgactgagagaagcaaggtcaccaggaccagctgcccggctgcctttctggcatccctgggctgctccttgcccaggtactgggccgatataacggcgcctccggtagccagggctcccatgatttgtatgattaagacgctgatggaatccaccagggaaacgccggagaccgcggattcccccactgcggccaccatcaccacgtccaccattcccaccagcactgccatgatttgttccacaataaggggagccagaagttttatcatttgttttctggaaaacatatcttacgttcctctttctctcatagttccagcaaatacccagccataatacccggaggcgctttttcctctcaggtctgtggctgggtatccgtgggacaggccagggcctgccctttattgtttttctgcattcattaccgcacttcgtagctcccggaacccatggccttcatagaggtgctgtagaacctccttgcggcccgaatcagataacaggtatccttgattcccactgtctcgtagggggaatgcatggacagctggggcagtccgatgtctactgtgttcacagccacatgactgttggaaatatttcccagagtggagcctcctgccttgtcggaacggttggtaaatgcctggcagggtactccctcttcctggcacagtgccctgaacacggcagctgaaagtccgtctgtggcatactttgtgctgtatttgatgacgattccctcattcatatagggacggtttacgggatctgatttgtctccatggttggggtgggctgcgtgggcattgtcagcggagaccatgaagctggaggcaatggccatcaaatactcctcctcgcttcttcccatggcgctgttaatccgcctcagcacatcctccaggaaggtggagtcagctccctgcttggtcaggctgcctatctcctcattgtcaaataccgcgtgaacacttacacactccgaatgaccgccctccaggaatcccttcaaggtggaaaatgcgcactgcaggtcgtctaaatggccgcaggataagaactccccgccggccccccagatacttccgggcacacggttgtagagatagagatcgtgtcccaggatatcctcctttttgacccctgcgctctcagccacagtctccataaaggttccctttgcgtccgcaccgccgtataagggcagcatgtctatctgggcattatactgatagccctcattgacctcacggttaaaatgaatggccaggtttggtatcataagcagatctcggtccacctttaccagctttgtggcaatgcagtttccctccttcactgccagacggcctgccacggaaaggggacggtcaaaccagggagcgcacagcataccgccgtatttctccacattcagcttcacatagtggttctctgcctccatctccggattttccttgattttaaaggagggggaatcactgtggctggccatgatctggaaaccggaaaatgcctttcccggcaccttaaaggacacaatggatgaaccgttcctggtcacatagtaggagccgccctctgtgagttcccacttttctccctcatgaagctgtgtgaagcccgcctcctcaagacagtccgcaatggactgtaccgcgtggaagcaggtggggcttttttcaagaaaaccgatgagttctttggctgtgcttaagcagtcttctttgtctatattcatatgatatctcctttgtctcttatttctcctctactgtaccataaagacatcgccacggcaatgcgggaagcttaactttttttctcctttgctgccatccatggcataatgaacccaagtcctaccagcacaaagggagtcacgatattcagagccagctggaagggatcctctgagtaaatacctgtcaggcatgcaaaggccgtgaatagaaagcaccagccgcccaccaggatgcctgctgttttccccttcacaaacctgtactcgccgcagaacgcatccccggccctttttaaggcaatgtatgccacaaagacccacagatatcgcaggggcatgcacaccgagtttaccttgaccaaccagcgcaccagaacgtccacgttcctaatgccaaaggcaggaaccacaatcagtacacagacaatgagcgtcaccagcctgtgtccgttcacataggtgccgtgttcatttttctcaaacatcttgccggggataaagcgggaatccgcactgtccaaaagcattctgaggggcgcgtccacggacaggaccataacggaaaactgtccgatcagattggtcagcgcgtataccaccacaaagaaattccccacatggtaatattcacccagcttctggaacgcgtagtaggctccgttggtcatcaggtcctggggaatatgattggagtcaaacatcatgcccagggcaatggtacccaggatggcggtcacggccaccatggctgccagggctaccatgccctttgcaaaatccctggaaggatccttcatcttatttacatagggggaaatcttctcacatcctcccaccgcaaaaaccaggatggaaaggctcagaaaaaaattggcgttaaaatccggtataaaggacgaaggggaccagtcaatggccaagaaggcaccgtctgtcagggccggagcagccaccatcatgacaatgaacagcatggacatgatgaacatggcagaacctgccaatgtggcaagcctctttaacacccccatccccttgccggacaggtacatggcaaacaggaaaatgaccaggcacagaatctgcatcaccgtggtgttcatgccgctggccctcttgtcctggaacagggcccagctggctgcaatcacagtggaattcggcttctgggatatatagggcatgtggaccacccagtaggtccagcctgcgtagtaagccatcttgggccctatggtctcatgaatccaggagctgaccccgcctccggcatgcttgaaggtggatcccagctctcccaccatcagggcatagggcacaaaataaatggcaaatataagaatccaggatacaatggcctttaatccgccgtattccgaaaatccgtttatcacattcccaaatccccagaccgttgaaaaagccataaaagccagggtatgccagagaatctttttatcatctttctgctgcatcacaatgtttctccttatctcattcagaatgtactttctgtgacatttctgtccatatcgtacattcttcccaaaatgagggaaagatataagcactcagatagaatcatgacctggtttccttcagatgatttactgcctcggacagcttcatgctgttggagcctttaaaaagaatgcagtcgccctccctgatgttttcgtccagccacttttctgcctgggccagactgtctatttcaatatgaggcgtcgctgcgcgggctgcatccattccgctgccgatgcaggctgccagctctccaagcaaaagaaccatgtccagtggatgttctcctatgtaggcgcctatttcggcatggaacctttccgtatccgggcctagctccttcatgtcggccaaaaccgcaatctttcgttctcccttcacgctgtccagcacctccagtccggccttcatggacaccgggctggcattgtagctgtcgtcaatgacagtgacgccgccccattcaaatatctgctggcgtcccttgtagcccttaaactgtcccagggccagtgccgccttctccatggaaagcccgtatgtatccgccactgccagggctgccatggcattgctcaccatgtggcttcccataacctgaaggcgcaccctgaccctgcagtcaccgtgaaccgccgtgaacacgggatacccctcttccaggtgcaggtcctctgccctgtagtcacagtccctgcccagtccgtacagcaccttcttcctgccccccttcggaaccactgaggccagaagagggtcgtcgccgtttaagaacaatatgccctctgccggcattccctcctggatatggagcttttcctccagaatgcgttcctgggatcccagctgttcgatgtgggctattcctatgttggtcataacggcacagtccaccctggccaccctggcaatgcgctccatctccccgggttcgctcatccccagctcaatgacgccaatctcagcagactgtgggatctccgcaatggtaatgggcactcccacctggctgttgctgttgcccggtgtcttatagaccttgaatccggcgctcagggcctccgctatcatttccctggtagtggtctttcccacgcttcccgtgattcccaccaggggcagactcaggcgtttcctgcaaaaacttcccaggtcctgaagggccttcttcgtgtcaggcacctcaatccacgctgcctgaagggctttcctctcctgctccctgttttccccgcactgctgccggacacaggctttaacctcctccccgcagtgatgttcgctggtaaataccacggccgccccgctggcaattgcctggcagagaaagcggtgggcgtccacccgctcacccactatgggcacaaacaggtcatccccctccatttttctggaatccaggctgatgtgttttgcatgctgatcctcctggccatggagcaggtttcctcctgtggcttcaagcagttccttaaccgttattcctgtcatactgtgtctcgtctcccaactcttttatggtttcttcaatgacttccctgtccaggaaatgatggcgcacgccgttgatctcctgatagtcctcatgtcctttgccgatgacagctatcatatcccctggctgcgcatgaaggatgctgcggcggattgcgtcccttctgtcaggaatttcaacaaagtcccctcctgttttttctatgcttccccggatatccgccatgatgtcctccaccttttcatacctggagttgtctgccgtgataatgcttaaatcggccagccttcctccaatctcacccatggaatagcgtctgtccttggaacggttgccgccgcatccaaataccaccaccagccgcctgggatgatactggcgcagggtggtaagaaggctctccatgcttaccgcattgtgggcgtagtctaccaggaccgtacacctggacgaggtgtggacgatttccatacgtccattgacacgtatgtgctccagggcgtggacaatcctatcttttggaagtcccaggaaggagcatacgcacagggctgccagggcattgtccacgttgaacaggccgggaattcccagacggacatccatgtccaggttccctgtgacatcaaactccgtgcccacaaaatccggccgggacacataccggacgtttgaggcttcaaagtctgccttcttctccccgtcctcctttacgcggtacgtataaagccggcaggacgcgtcctttacgatttctttaaaatgcccgtcgtttaagtttaccagccctatcctgcacatgctcaaaagacgtgatttgcagcagagatattccgcaaaatcagcgtgctcatccggcccgatgtggtccggggatatattggtgaaaatgccgtagtcaaaggcgaggccgtccacccggtgcatcttgattccctgggaggacacctccataatcatatactggcagcctgcctccgccattttcgcaaaggactggtgcagttcataggattccggtgtggtattcatggtaggggtcacctgtccattgatcaccgtgcctgtggtgcctatcatccccaccttttttcctgccgcttcaagaatggcttttatcatatgggtggtggtggtctttccctttgttcccgtcacgccaatggtaatcattttggacgcaggataaccgaacctggctgccgagagaagagccaggcttctcctggcctctgctgtcttaagtattgtcacccggcccatctcatcctccgtaagtcctgaggcagccaattcctcctcaatgtcccgctccgtcacaaggacgcggacgccagcgcgcagcacatccggtacaaaccggtgggaatccacccgggtccccgccatacacacaaacacagcaccgggcactgcctttctggagtcgtagaccacctctgtgacctccacatccaggcttcctctgacaagttcataatccagctcattcaaccaggttctaagtatcatatcaatacctcatttctttttcgtgcaacttatattatgccaaaatatatcctggcccggcgctcctttttcggatgcgccgggccaggcccatttcctagaaaagtccggtaatcttaccgttctcatccacatcaatgctgtctgctgccggtttcttcggaagtcccggcatggtcatgatggaacctgtaagcgccaccacgaagcctgctcctgctgatacataggcatcccttacattgatggtaaagcccgcgggccgccctaacttggtctggtcatccgacagggaatactgggtcttggccatacacaccggcaggtttccaaagcccatatcctcaatgcgctttaacgccttggcagcggccggtgcaaaggaagcgccgtctgctccgtaaatctcttttgcaatggtgttaatcttatccttaaggctcatctcatccggatagagtacatggtactgggttggcttgttctccagtgtctccattaccttttcagccagggcaatgccgccctcgccaccctttgcccatacctcggacagagcgaactcgcatcccctgtcttcgcagaacttcttgatataagcatattctgcctcggtatcggatatgaaggaattgagagtaaccaccacaggcacgccgaacttctggaggttctcaatgtgcttctccagattgacaatgcccttttcaagggcttccagattctcagctgacagctggtccttgggcacgccgccgttgtacttaagggccctgaccgtagccaccagaaccactgcgtccggcttaagccctgccttgcggcacttgatgtcaaggaacttctcagctcccaggtcagcaccgaagccggcctctgtcactaccacgtctgccagcttcagggctgtcttcgtggctctcacgctgttgcatccgtgggcgatgttggcaaacgggccgccgtgtaccagggcgcctgtgtgctccagggtctggatcaggttgggctttaacgcttccttaaggagggctgccatggagcccactgcatggagctgctctgcggtcacaggctctcctgcaaaattataggccacaataatcttgcccagacggttttttaaatcctccatgttgtctgccaggcacaggatcgccatgatttcagaagccactgtaatgacaaagtgatcctccctgaccatgccgtctccctttgctcccaggcccaccacgatgttgcgcagaacgcggtcattcatgtccacacagcgcttccactggatctgccttgggtcaatccccagggcattgccctgctggatatggttgtctaagagagctgccaacaggttattggcggaggtaatggcatggaaatcacctgtaaaatgcaggtttaaatcctccatgggcacaacctgggcataaccgccgccggctgctcctcccttaacgccgaagcaggggcccagggaaggctctctgagggctatgatggccttctttcccatctttccaaatgcctcgcccagaccaaccgtggtggtggtctttccttctcctgccggtgttggattgatggctgttaccagcaccagctttccgttgggacggtcctttacctgctcccagagttcatctgtcagctttgctttgtatttaccgtaaagctccaggtcatcctccccgattccgtaagcagcagccacttctttaatgggctgcatcacggcctcctgcgcaatctcaatatctgatttcatatttttgttcctcctcttatattacgccccacggtttcccgcctttgcaggtccgtcaacgttttattcaaaagcaccggccgctgctgcccttgccggcagccgctgctcttgtttccccatacacccctgttcccctgctccggcccgcatgcgccgcgctttcagggaacagtttctaatacccctgctccagcagttcctcaaattcttccatgctcataagcactttcctgggcttggtgccctcttcctcgcccactacccctgcttccgccagctggtccataatccgggcagcccggttgaagccaatcttaaacatcctctggagcatgccgatggatgctttttctttttcaatgataaacctgccagcctggacaaagtactcatcccgttcagaagccccgcttcctccgtccatggacggggaagagacacggctctccacttccggattatattccgccaccatgccctgttctgtcaggaattccaccacccggcccacttcctcatcggacacaaaggcgccctgtacacgctggggtttggggaatccagccggataaaagagcatgtcgccctttcccagcagcttctcggccccgttcatatcaataatggtcctggagtccacgcctgaagacacggcaaaagcaattctggacggcacattggccttaatcagtccggtgatgacattgaccgacggcctctgggttgcaatgaccagatggattcccgccgcacgggccagctgggccagacggcagatagcatcctccacttctcccggagccaccatcataaggtctgccagctcgtcgatgataatgacaatctggggcatcttcaccggctttttgtcatcctctatatcctttatcttttcaactctttcattgtagccctttaaatccctgacattgcactccgcaaacttcttatagcggtccgtcatctcggccacagcccagttcagtgcccctgaggcctttttggggtctgtcaccaccgggataagcagatgggggattccgttatagacactgagctccaccaccttggggtccaccataatcatcttcacatcctctggtttggacttgaaaatgatgctcataatcagggtattgatacacaccgatttaccggaaccagtggcgcctgctataagcagatggggcatctttccgatgtccgtcaccaccacctgtccgccgatatccttgcccacggcaaaggccagacgtgacttgtggttcttaaacgattccgcctccagcaaatccctcaggtataccatgttgttctctttgttaggcacctcgattcccaccgccgacttgccgggaatgggcgcctcaatacggatatccgccgcagccagactcagcttgatatcgtcggtcagccccactatcttgctgaccttcacgccctgctccggcaaaagctcataccgggtcacagcaggaccgcagctgatatttgtaaccgtcaccccaacaccaaagttatggagagtctgctgcagcttaatggccgtggccttatactcatccccagaaaaggaaccggcattcttagcccccttcttaagcagggtagtaggcgggaacacatattccttctttactgcctcttccttttccttgatttcctgggccaccgccatattggaatcggtctgtccggcctcctcccgcttcttctcaatctttttctggagaagttctgtctcagtctctataaccttgcctgatgccgtaaccacccgcttgggctcctccggcacaaatatgctgtcataattgataccctgttccgacgggtctgtctcatagatatctgtttccggaacatccgtttcaggaattcccgcctcatggtctgcggctctgtgcagtcctgtcccgtgaaggccggccgtacccgcgctttcagcagacaaggcagctccttctgccatatccccagacgtcccatattcttcttcccagggaaccgtatcctcacagccccggtcatggccataaccgtttacaggattctcgtccctgtccgcagaggacctgacatgaaactccatctcctccagggtctttaaatccttcttcacatggatggtgtcatagtcctccccatcatgtgtcccatactcgtcctccacaagaatgccggtgaccaccggcgcttcttcccggcgtcccaaacggctgtggccctctatagacctggccagggcccccagttcatccgtgtcgtaggaatccccggcatcggtccccggctccaaaggcggatcaaacctgcccacaaactcatccggcggcaggctgtcctttgcgccggctgtctgggccggcccccagtccttctcgtatgtatcgggcatttcaggcatttcctccagatccgctccaaactcacggtcaaatgcctcctcgtcataatcctcttcctcaggtgtcatcagcctggtggcattcagattaacgcccctcaccctctgttcttcgcggatgcgcctgcgctcctcctcccgtatggcgtgaagctccctgcgccggtccatatcctctctggcatactggtaagccttgtcccctccccgcttcacagcagacacaaaagagcgctccgtgatgcataccatgcagatgatgaacaggaccaccagaaccagaaaggttcccggcttccccagtccgatggtaaggaaggaggtaaggacgcctcccagccatccgccgcccgtaccggtcagggtggactgcttataatattccatccacttcgcgccggccggaaccgtaccgaaggccagctgcagcagcccgcagaccgtaatcacagcccctgccacggctgccagcttcatggcagcatggatgtttccctggttggacagatggaaacaggtgcccacaaatatcagtatggggaatagataccccaccattccaaatattcccagctgtactccgcgcagcacatcgcccaccacgccgcacagcttgaaattgctcagaaataaaagaatggcaacagcaaaagagcagatgatgaccacttctgctctcatgaattccgtattatcctgttcataggccttttttccggatgtcccgcggcttttggaggaagtgcctgtctttttggacgtgcttccctttggccttcccggttttctgttcccactctgctgtcgttttgttgtttcagccacttgatacagcctcctgtcattctcttacaagttgtcataccgtatcagcctcccattcccacagcaggctgtctcatttatacagttaacttatattatgctatatttgaggttaaaattcaagtggattgtttcaaaagacggaatctaccgcctgcgttcccgatcatcaatcatggcataaagctttccaagggcttccttgatgcctcccacctggttgataagtcccgcctccacggcctgggttcccaccagaacagtgcccaggtccctggtcagcatctttgtattatgcatcagctccctcagctggtcataggcgatatcggcatggtttgatacaaacgtgagtatgcggtcctgtatcatttcaaaatactcgtaggtctgggatgtgcctataaccatccccgtcatccgcaccggatggatcatcatggtgccggacggcacgatgaaggaataatttgtggacacggccaggggaaccccgatggagtggcttccgcctaacacaagcgatacggtgggaagactgagggacgcaatcatttccgcgatggcaagacccgcgtccacatcccctcccgaagtgttaagcagcaccagaagtccgtccacactgtcgtcatcctctatttcagccagcttcggcagtatatggtcgtattttgtggttttgctgctcccggaggaattctcatgtccctccacctccccaatgatcgtgatgagatggattttcctctgcttgcggttgtcctccagaatgacctggccatactcctccagcttattgtcttccttttcttctatttccttttcaagctttttggcttcatcgtcctgctggcgtacctgtccgtttccgttttccgcctgactgtctctttttttcctgttgttttttccttgtcccataatcagaccaccctttcgtgaacattcatcaattaaggatagtctgcaccgtgaaccataaaatatgcgctgtcttttacagagtttcgcgcaaaaataaccggccagcagagactgctgaccggctttctgaataaaataccatttttttaatctagtcgcccaacacattcctgatagcaaccggcgacctgtaattccaggtagaaatcttgataccgctcttacggctggccgcatggactacctggccgttgccgatgtagatggctacatggtttacctgtccgccgctgcccgcgtagaatatcaaatcgccgggacgcatgttgccggaggtaactgccttgcccatcttggcctgggagccggaataatggggaagggacacaccgaactgtttcatgacctgcatggtgaatccggaacagtccacaccctttgtcaggctggttccgccccatacataggggttgcccacaaactgaagggcgtaattcaccactttggaacgcctggacgccgcgttgttggccgccacctcagcaggtgagaacttgatggcctcgttcagcgcgtagcgcacctccacgttgttgtccctggtggaaataaacgccttatccaccttgcttccgtcctcttcatccacggaatccagatcaatctccacccagccgtctaactgggccacaaccggataacgctcgtcctttacaatctgggtccagattttggcctccgtattgggctccgtgcgcacattcagcacgtctgtgttgataaccgccttgagggtggcgttctgcatggctatatcctttgcctcctggcctgtggccgtgtactgggggtctgccgagatataaccgatgatggggcctgacttaatcttataccagccgtccagggtctccaggatctcgcctgccgccttgctggtcatcttacctataatcttgccgtctgactttggctcctggcgcacgttcaggtagttgttcaccttggaaatcaccagattgtcatactggttgatggccatggccttcatatccattttacgtccttcgttcagggaataggccacctcagcatattcagaggaaatatatccctcctcaatctgaatccagccgtcctccagtcccttgaccacgtagcgctctcccttcaaggcctgtccgataacatttcccggatccagggcaggggcctgacggatgttcaggttgtcagccgtcaccgtagcacgcagcttgacaagctcctttgccttttccctggcttcgtctccggtcagaaggtactggttgctgatgtagccctccactccgccggaggtgatgtgggaccagtccccttccgtcgccagaatctcgcaggctccgtctcctgacagcttacctatgatcttgccgtcagtgcttggagtctcccttatgttgaggtagccggacacctgcacgatacccagattgctgtaggagctgattacattgtcaatctcctgggcttccttctgagctgcttcctcctccggggaaacactggccggagccgcctgggccggggttgcgtttcccacctgtcccgtgggggccggtcccgctgctttgccggataccggcttcttgactgcctttactcccagcacaatgattcccactgccgcgatggcagccaaaagaagcaccaggtatctggggtccagacgttgattccgtttttttctggccttgttcaggctcgatagataatccttatgttcaagcatgattctataatctccaactcattattcgccataaaagctcatatgacgttaagtatatcataaaaacagactcgaaaatgtgaaaaatttcttaaattttgccggtccccgaagtatttacatgaaatgccccggaaaccggcaattttactgcctgatagggattactttgagaggagcatgcggtcattggcaaactgtcctccgctggcctctgcaaacttggcaagaaggtcctctacggtcaggttctgcttttccctgccggatacgtcatagataatccgcccgtcattcatcatgataagccggtttcctatctggatggcgtccttcatattatgggtcaccataagagctgtcaggttctgctccgtcaccatctcattagtcaggtccagcaccttcctggccgtctgcgggtccagggctgccgtgtgctcatccagcaggagaagcttgggcttctgcagtgtcgccatgaggagggttagggcctgtctctggccgcctgagagcagtcccaccttactgctcatgcggttctggaggcccagtcccagcctggtcagcaggtcgcggtaatagtctttctcattggccctgattccccatcccagccctcttttctggccccttctgaaggccagggccatattttcctgtatttccatgccggccgccgtgcccttcatagggtcctggaacacccggccaatgtatttggcccgcttgtattcgggctgcctggatatattcacaccgtcaatctcgatctttcctgaatcaatggggtacacgccggctatcatattgagcatggtggacttgcccgctccgtttcccccaatgaccgtcacaaaatccccgtcgttcagggtcaggtcaatgccgtttaatgccttcttctcattgatggtgcctttgttgaatgttttgcgcacattggtcatgatcagcattatacattccccccttccgagtattccttgtaggtcctccatttattggcagctaccgggatacagagagccagggtaaccacaatggcggataaaagcttcatataatttggattcatgcccatcttaatgacaaaggcccggatgacaaaatagatcacggagccgatgactgccgctgacagcttaagggcaaagttgcggaaccagccaaagagcacctccccgatgacaatggctgccagtccaataacaatggctccggtacccatctggatatccgcgtatttctgcccctggcacaccagggcgccggacatgcccaccagaccgttgctgagcatcagtgccagcagcttggtccacttggtattgacccccagggcgcggatcatatcctcgttatttcccgttgccctcagggcgcttcctatctccgtgccgaagaaccagtacatcacgacaaccataagtatggctgccgcgatgccgatgacctgggacgcctgggcctggttaaagcctgtggcggaagaaaccatggtcacaatggacttggacttgagaaggggaatgttgctgcttcctcccataatccacaggttgatggaccacagggatatctgggtcagaattccggccagtatggaaggtatctcaaataccgtgtgaaggatgcctgtcacaaaacccgccgccattcccgccagggtggctataaacagggctgccaccggattcattcccctgcccacaatcagcgtggcacagacgcagcctcccagtgcaaagcttccgtccacagtcaaatccgcaatgtccagaagcttgaaggtgatgtatacccccagcaccatgattccccagagcacgccctgtcccactgcatctaacagattggggcccatgccctgcatcagattcgcaaaattcatatcttatatttacctccctttctgtctctatccctttgtgtgatttgatgatgtaaatagcttgcccaaaccgctgttcccggaagccttacagcttgagcaaaccatctaccttctttaccggacgccattttatccgatgaccgctattttgcccgatgaccgaaaagagggtgctgcaggccaaagcggttttcaccgtctctgccccgcagcaccgcctgtatcattctgagctgcctggctgtctattttaatccggatacatcaatcccaagtgtctgggctgtttcctcgttcactgtcagctcgcacttctcagccggcaggtactcaatcggcatatcagccggtgacgctccctcggtgaggattttcacagcctgctggccggtcatatatcccagctggtaataatcaatgccgtatgtagccagtccgccgttctgcaccatgcctgcctcgccgcagataaccggcagattgttgtctcctgccaccattccaactgtggccatacctgctgcgattacattgtccgttggggcgtaaaccgcatccacggcacctaccatggactgtaccacggtctgaatctcattggaactggaaaccgtgtattccttgctctccatgcctgccgccgcaatggcttcctttgccatgtcagcctggatcttggagttggactctgcggagcagtacagcacgcccacggtcttggcttccggaaccagctgcttaagcaggtcgatctgctccttcacaggagtcaggtcagaggttcctgtaacatttgctcccggcttttcattggtgtcaaccagaccggattcagccgggtctgtcactgcggtaatcaggacaggggtatcttccactgcgcccaccatggcctgggcagccggtgtggcgatggccagaatcaaatccttcttctcattggcgaacttggatgccactgtctggcaggctgactggtcgccggaagcattctgctggtcaacctcgtaagcgattccagcgtcgtctaaagcagcgataaaaccgtcattggcagcgtccagggcggtgtgctgcaccagctggagtacgccaatcttataggtggttccctctgcctttgcagcagtctcactatctgatgcctctgccccggttgtctcctccgcctttgaagccgtatcagcttctgtctcctgggacttggcggcagctgacgtggtttcagccgtattgcctgcgcaggccgtcatggacagaaccatggcgccggctaaaaccagggacatgatttttgatgtctttttcataatactatctcctctttccacataagaattcgtcctctgtcaggacttttcctatcatactacaaaaaatttgcgccgtcaattttattactttaaatttctgtgattttaaagtaataaagtgaaaaactggtgttttttgcagatatttccattcttatttatgcatatcgagaggaatggtgacagtaaactctgttcccttgtctaactcagaggtcacatggatggttccatggtaaaaattcacgatgtgtttcacaatggacagacccagccccgtaccgccctgtttgcggctgcggcccttatccaccctgtagaaccgctcgaatatgcggtccaggctttcctttggaattcccacgccgttgtcctttacccttaccagcatgtcatctccctgttcacccaccgtaatccacacctggcctccgggccggttgtacttgatggcattggtggccaggttggtaaacagctccttcatctgctgcaggttagcacggatacacaggggcttgcagtccacatggagaaacacctggcaggaggcagccagcggctttaggctgtccatgatctcctggagaagcacgctgattctcacatcggaaaacattacctcggcatccatggattccaggcgggatatcatcagaatgtcgttgataagccctgtcattccagcggcctccttcttgattctctttgcgaaatccagcttcagaccgtcatcctgaatcatgccgctctccagtaactccgcgtagccctggatggaggtgataggagtcttaagctcatgggacgcgttgctgaaaaattcctggcgaatctgcttttccttttcaatctggcttaaatattcttttacgtcctttgacatattcatgatggtctcggcaatgacgttgatttcaggatattggcagctttcaaactgcagctccgtgtaatccccttttaccttcatcacggctttcgagatatcgcgcaggggtctggtgaccgatgacacaaagcgtctggtggtcaccacggagcagaccatggccataaggaagcttaaaatggcggccggaaacagcatgggaaggtattcctgtatgccggaatagggcacggccaggcggagcaccatgtctgaatactcagagcggcaggccacatagagcatggtttttcccagtgttttggaatagcgtctggcatacccctccccgtgctccatggctgcccgtatctcctcacgtccctggtggttgtccaggtactcggcgtccgcgtcagaatccgttacaacggttccatccgactttataagtgtcaccctgctggaatcctggtccgtaaacgcctccaggcgctccatctgctccattaagtccctgtcgtaatccaggatgctgtccacggccttgatggtgtaagtcatatcatttttggagttttttaacatcattttgctgctggcaatataaaagatgacgctgttaatacacagcgccgccaaaagtaccaggataaaacgttccaataatgctttacgcatgtcttcctccttggtttcctgtcatgttatctcaccatacggtagcccacgccccggaccgtcttaatgcaggcaccgccctcttcccccagcttctggcgaagggtgcggatgtgcatgtcaagggttctggtctctccatcgtactcataaccccagatgcggttgagcagttcatccctggtcaccaccctggactggttctccagcagataaaccaacagctcaaattccttcagtgtaagctctaccagccggccgccgcttgacacctccctggtcttgcggttgacctggatgtcctggtagaacagcacatccctgtcctcctcccgtttggtcctgcgcagcaggctgcggatgcgggccgacagctccagaaccccaaagggttttaccatgtaatcgtctgccccgcagtccagcccaaccaccttgtcaagctccttttccttggccgtcaggagcatgatgggcacatattttaactgctccgtatttcttacctccttgatggcctctgtgccgtccatccccggaagcatccagtcaaagattaccaggtccggcttttcctccctcatcctggccaggccctcctccgcggtttcaaacccttccgccgcatatccaaagccttccagggcaatttttaacagattcatgatgttttcatcatcctcaataatataaatccgttccattttccaactaccgcctttcccggcatacagcctatgtaaacagcataccagactgaagtaaaatccacctcatgggaatgtaaaacttgtgtaaagtttttcccgctacaggacctccttatacacccggagcacatttttacagaatacagcttctatttccgaagaggtaaatccttccctttccatggcatgcgccagcatggggagctttcccgcatcccccatctccaggttcccgctgattccgtcgaagtcggaacccagcccgatacagccgatgccgccaattttccgaatatgcttcatatgctccaccatgtcggatatgcggcttaactgctcttcccctggtccgaagtcccgcaaaaaggcagtgcagtaattgatgcccatgacgccgccgcgttccgccagggcgcgtatcatatcatcggtcaggttcctcggatgggaagccaaggcccttgcgttggaatggctggccacaaaaggttttctggtatgccggaacacatcccatatgcctgcgtcattcaggtgggaaatatcaatgatcattcccaggcgctccatctcctccacaaatgcaatcccggtatccgtaagtccgtgctctgtatccggcgccatcctgaaggtaccgtcctcctctgcaatcctggcattgggaaatgccagctcattgggaaaattccaggtcagggtcatcatgcgcacacccagccggtaaaaatcccgcagaaacgccgttttaccctggcaggtcccgccttcctccactgtgagaagggccgacatcctgccctgctcccagtttctgctgatatcctcgtaggatcggacgattcctatgatatcctcatgggcctccatttcctggtagaaggtatcgagaagttccatgcagaattcaaagggccttcccttggcctgttccagattgacatacagggcaaaattctgcagcccgtaatcccctgcctgcatctttttcaaatccagcatcatctggttctccaggatggactgcctgcctcccttcttatggtccttatagatttccgcaatggtatcgcagtgcatatccacaactttcatatccctgtcctctttcctgttctttggtattcccaatttattcccgtataaccggaaatattctgtcacccgttactatgttccagtttatactgactgcctgtttctgtcaatcggctgcattggcctctgagaggatttcccctgcccggcagattgcatcgtcgatgcggggcgctatgttttcccttcctatctccttatcaaatcctgctttctccatcacagacaggggctgttcgtttacatgggaaagaatcatggtgatacgggccttgcggcacctggcgttcagcttcttaagactgttcagggcggttgcatccatggcgggaacgcttctcatccgcagaatcagcaccttcttgtctgaatccaggggaatctgtccaatcttgtccgccgcgccaaagaacatgggaccgttcacctcaaacaccataacctgtctgggcactggttttaagtcaatgcgctccctgtccgtgctctcctcgtaatcctctgcgtacttccatccgtaaatatcagacacatccgccatgcgcttcatgaacagcagacaggccagggccagtcccacgccgatggccatgaccagatcgaacaccactgtgagaaaaaaggtcagcaccagcacggccgtgtcacttttgggcgctgtcttcaccacatctgcaaaggaccgccactcactcatattgtaagccaccataaacaggatggccgctatggcaggcatgggaatcagagccgcatagggcatcaggaataccagaatcagcagaagcactgctgcgtggaccatgccggccaccgggctgcgccctccgttctttatgttggcagctgtccttgcgatggcacctgtggccggaatgcctccgaaaagcgctgaggccgcgttgcccactccctgggccaccagctctgcgttggagttgtgctttccgcctatcattccgtcggccaccacacaggaaagcagggattcaatggcagccagcacggctatggtaatggcgtccggcatcaccttctgtaccaggctgaagctgatattcggcagatggaacgcgggaaggccggaggaaatggtatataaatcccctatggtattgaccctcaggcccattcccttaaccagcaccgctgcagccgcaacggcaatcaatgagggcggcaccttcttaaagaacctgggccacagaatgagaatggccagtgacacagctcccactgccagggcctgaaggttcagggtatccatgcaggagataacctggcccagcttctccatggtctccaccggtgattccctgaaggtaagtcccaggaaatccttaatctggccgataaaaatggtcactgcgataccggttgtaaagccggttgtaatggtatagggaataaaccggatcaggctgcccaggcgcagaaagcccataataacgagaataagaccggccagtatcgtagctgtggccagtccctccattccgtttttcatgacgattcctgccacaatggtggcaaaggctgccgtagggcctgctatctgcaccttgctgccgcctaagaaggaaataacaaacccggctatgatggccgtgtaaagtccctgttccggtgtcacaccggaggccagcgccagggctatggacaggggcagggctatgatagccacaatgattcccgatatcacgtcctttgtgaattgttcctttgtgtactgtttcatggacagaaacagctggggtgtaagcgttttcatctcatctttatccttttcgtgtttataaaatgttaatacttttttactatagcgaaaggatggccccatatcaattgttttccgtcatgtttccaatataatacaaaaagcagcagccggcacggattactcacttctcagggcgtctatgggatttaggttagccgcccggctggcaggcatgtatccgaacagcagtccgattccaacggatacgctgaaggatatgacaacagccgacagggtgggggtggcggacacgcccaccgctgctcccaccacagtggtggcgacgcagcccaccaggattccgatgatgccgcccagggagctggtcacagcggcctcaatgacaaactgccgcatgatggttcccttatccgctcccagggatttgcggattccgatttccctagttctctctgtaacggataccagcatgatgttcataacccccacaccggccaccagcagggagattcccgctattcctcccagcataccgctcatcatggcaatctgctcgttcagggaatccagcatctcgctcatggccgtcacgcggtataaatcctcatccttaaaggtttcgtacaggaaattcttgatgactgcggtgcactcgtccgccttgctggtatccagcgccgtaaaggtatagttggtgatattggcgtttctggacatcttcacggctacgctgtatggaatccatacaaagtcatcggttcccccgtcctccatgttatccgcgtcctgggcattcaccacacctatgattttaaaggcatagccgtctatcttaagggtccgccctatggcgttctgggagcttccgtaaagctcattggccacgtaagcccctatcacgcacaccttctggcgggagacaatatccgaatacgcaatgttcctgcctgtttccagttcataggacttgatttccagatactgttcactgcgccctgccactgacgtggatgtcatggagtcatccccgtatttgatggtggaggacaatgtcacattggggctcagttccccgaacaggtctgtatgttcctcataaaatgcatacatctggtccgcatccagggaacgggaagccagattggtcacatttacattgatctggttcacacccatgctggcgaagctctccaccacgctgcccatgtacccgttgaccagacttaccagtatgatgaccgcggccactccgataataattcccagcatggtcaggaatgaacgcatcttgttgccccaaatgcttttaagggccagcttaaatgattgcagcatagtcttttacatctccgtcaaaattaatctgcccatcctttatccggaccacgcgcctggcttccatggcaatggcgttgtcatgggtaatcatcacgatggtgtttccctcgtcgttgagctgtttgagaaatcccagcacatcgcggctggtcttggaatccagggctcctgtaggttcgtccgccagtatcagtgaagggcttccggccagggccctggcaatggataccctctgctgctgtccgccggaaagctggttcggcatgttcttccatttttccgacaggcccaccttttccagggaagccatggcccgctcccggcgctccgcatttcccacaccggcgtacagaagaggcagctccacattttccagtatgttaagcttgggtagcaggttatactgctggaaaatgaagccaatcatcttattgcggatgcgggccagctgtttgtcatccatgatgcccacatcctcgcctcccaggagatattcgccgtccgtgggcacatccagggccccaataatgttcatgagggtggattttccgcttcccgacttgcctacgatggccacaaactctcccctgtctatcttcaggctgatatcgtcgttggcccgcacctcttcccctcccagatagtatatcttatggatatgtctcagctcaataagtgtttccctctgactggtattgtccatgtgttcctggttcctctctgtcttacttccggttccttccgggcatactttaacggttctggcggcctccggagccgccccggttttgtccgcccatgtttccgcctccgcccggagggccgcccatgccgccgtccatcatcatcataaagctgctgctgtttttgctggattcagccacatagaccacgtctccttccgaaaggccgcttgtgatttccacgtatgtgtcgcttgccagtcctgtttccaccttcacagaccggaaaccggcaggcaccggcccctgctgctccgtcactgtgtcatccttcacatagacctggtttcccctcatcagggcatccacggggatggccagcacatcattggcctcctcaagagtaataactccgtccacattcatgccgggcagcaaatcccccatatcatccagggtaacagtcaccgggtaggtgctgacaccgttggaatatgtgctctccaggctgacgttggtcactgtgcctgagaatgtctgtccctcaaaggcgtctgctgagacctctaccttctggcccacctttactttcttgatgtccagctcgtctatggacatctcaaatgtcaggctggacaaatcgtagatggtggccagcaccgtggtgctggagctgtttttggtgatattgtctcccaccttgaaattcttggtgataacctggccggagattggcgcctttatagtgtaattatcatagctgtcctgggtgctgtccaacttgttctgggccgattccacgctttcctccgccttgtccagggcgtccttgtagctctggatcagcttatctgccgacttgtctgtcatcttaaaaacaggggttccttttgtaacgtagtcccctacatttaccagcagggactccacctccacactggtggacaggtccgcattcatggtggtgtccaccgatgcctcgaacactccgtcctcactgcctatgaattccccgatctgggccgtggctcttaaggatgtggtcaggccgccgggattttgcacctgtatggtaaccacacgtaccagccgtccgcctgtaaggacggtttcctggttagccactgccttgactgttcctgccacctgctctcctgtatccgtcagggtaacggctgccggcatcccggctcctatgatggctgcctccccggacaaaaaaggaattcttatttccatcacatcgtcgctgtaaacatcggccagcttggtgtttccgctcaccttgtcccccacgctgatatacagttccttgatatatcctgtgtcggtggctttgtaggtgtttccgctgtaatcactcagggcgtcattataatcttccagggcgtcttcataggaggactgggatctgctcagggaattcaccgagctggtcagctgggactccatgctggacttatcaatttcatagagcacctggtccttttccacctggtccccctcctcaaagccggcagataacacctcgccctccaccatggaagtgatgctgtaggtgtccttggccttaagggttcctgaggaagacagttctgaggaaatgtccctgtgctccaccgatgccgtattgtgggactgtgcctgggcagtggctgcctttgccttcatgcccttaagggtcatggccgcggctgcggctgctcctattatcagcaggattaccaggggctttacccatttctttcttcccttcctgccttttactgcctgtgccggggtgccgggtgctgcttccctcttatgtctgcccgtggaaagcttaaataagcgcaggacgcctttcttcttttcttccataccgcacctcacccttaatattctatggcgtcaactgccgtatagctgctgccgctcttattgcataccattaccacctcatcccctacctctatgccgccgtagatggaaaaaaggtactgaagctccgaagaattcagattgatggtgagatatccgtcctcgtcaattccatcctctccaaagtccccgtccgaattgtcgtcatcaatctccagacggatggaggtgggcgtcatcacatccgtggatttataataaatgttcttgacctcgccctttaacagcacataggcgttgtttccctccagatcatcatcgtcccatcccctggtggtgtaggcccagatggttttggacttcacattatagtagacaacggcaaagcccgcatcctgctgggatgccttcactgcctccagtgtgctggctgttccgtttaaaaatacattggcattttccgctccaaagggcacggactggattacgctgaagcccttgcgcaccagtatggggcctttgcgctcgtcgtccaggatggtgatgggattgatttccccgtctgagttaagctcgcagtccagaacagccccgtatatttcgctgctgtcctttttctttgtctttaacaggttgtaaaacaggttcatgcagtctgtctggttcagcacttcctccggctggcggttcatctcctcgttcagctccagatagttgaacttggaaatgcgcgaggacgccaggtccccggtaaagtcctcgtccgaataccccagcatggtcagcgctgccttcacagcgtccttatatgtaatatactcctcaggcttaaagagccctcccaggaaaccggtcatccatccctgggaagccgcgatacggatatagacagcatccggatgggtacccggcacatccgcgaacacggacacgctggaagaaggcaggttttcccggtagctggaggcattcaccagcattctggcaaaatcccctctggtcacctgtcctgtgtaatccgtcacattcaggattccggtcaggttcaccacctgtctcctcatgtcaaagtttgcagacgatgtattggctgcggcagtcacaggcagagccgaggtcactgcagtaatggctgccagggaaccgcacacataacggcaggctgcaagtggtcttttcattgcttttgctcctctcaaatcaatcggtattatcctttatttttttatactctatcacagtaatgtgttcattttgtgatatgcgcgcaaaaaaaacgcaaaaacagcctgtgaatacacggatgaattccgtttttccacaggcatatttttcagtttttctttctctcctattacatcaaaggggcaacaaggcgcataagacgtcccagcttctttcccatccagctgtaatttttacagtcctccatcgtgataagactgcatttcttaagggtctcctcaaaatcacgctccacgtcaaagaccaccggattgcggtaaatataggccgcgcattcaaaatgcaggtaaaggctgcggaaatccaggttaatggtgcccaccacagccttttcgtcgtcgctgacaaaaaccttggcgtggacaaagcccggcgtgtattcgtaaattttcacgccggctcttgtgagctccggataaaaggttctggccagcatgtaggcatactttttatccggaatatgcggcataataagctttacgtcaatcccgcgtttggcggcatagctcagggcattgaccatctcgtcgtccagaatcagatagggcgtcataatatgaacgtagctcctggcctggttcagtatatccagataaacacgctctcccacctgctccctgtccatagggctgtccccatagggcaggacgaagccggaatggtctgatgcctgaggatgttcatagtctttggggaccgcatacttcccgtaatcctccggctgcctctccgtcacattccacatctgcaggaacatcatggtaaagctctgtaccgcgtctcccttcagcatgatggccgtatccttccagtggccaaagcgcaccttgcggttgatgtactcgtccgccagatttacaccgccggtaaaggccgtatggccgtctataaccacaatcttcctgtggtccctgttattctgataggtggacagggttggctttataggcgaaaacatcttacaacggattccctttttctccagcaccctgggataatggtacggaagaagcatgaggcagcacatgccgtcatacataaccctgacctccacaccctcctttaccttctcctccagcaccttcaggatactgtcccacatgtatcctcgctctacgataaaatattccatgaaaataaaatgccgggccgccttaagctccctcatgagagcctcaaacttgtcctcccccagcggaaagtattccacatgggtgttgccgtaggcgggataccccgcgtgatccttcatgtaatcaatcagatggctgcttctcctgctggcttccctgattcgctcctgtacttcccggtcctgcttcaggtaagcagccgtgtcgcctatgttttttttcaggcgccgggccataagctttgtctggaactgcatctgcacaaatatatacagcaggactccaaacaccggaatcaccagaaccggtacaatccaggccatcttaaagctggaattaataggttcattgaaaatataaatgatgactgccgcgctcaaaaggatggatatggcgtatacaatgtgcatgtactcttccagccaccggaaggcgccaaacaggattcccacctgtatggccataaacagcaccacaaaggccgtccttccaaatataatccggaataatcccctcaatttcttcatcctgtcccttgtctcctctcatgtaacaaatgatgtactttatcgtacagcttatcatacgggtttatacagcccaaaaatccctggtgaaaaaccggcatccgccgacctgattcaccagggtttattctctgtctttatatggctgttacagccttcggggcgcccgtgaagattctgctgtccaaatccgcaatggtgactttctctaaatatgcctggcagcactggttcagctctccatagagctcgtccatgattcccgccatgcctgacgaaatgagacaggccatatgcggattgccgcttttccaggaggcagccacaaagggggtatccagagcctcagccaccatggacaggttcacgtccctgctgtcacggtggaacagataaccgccgtccacaccttcctttgttttcacaagatccgcctttttaagctttgccatgaccttacgtatcctggcagcattggtacagacattcgctgcaagaccttcgctggaaaacacagttcccttgtgattcaaaaaaaccagcgcatgcaccgcaatggtaaattcacttgtcacttttccaattcccctttcctatctgcaacagcctgctgctgtctttcattaaatcataccatttttttcagaaaaatgcacttattttttatttcataaaccaattcataagccagcttccaagccggctcatgtaccaaagggcattatggcctccccttctgcggcagcttcttctgtctgcccttcctggaggttttctcccccgtccgtctggggaagctcctgcgatggcggcagggcggctgaattgcgctgtatcttagcgggttttgctttataggtgctggtgtaaaggaaggtctcttcctccacctgtccattttttgtacggatgcggtaggacttccagaccgagcccggctgggcctgctccactatcttttcttccccataagccagctcagggttttcctcgtaaacaggcgccggcggttccagctccctgatcttttccgagcgcatggaaatgcgttcattctcttccagcagaggaaggcctacgatagaaagcttcagctgttttccgtcaaaggaagccctgaggccgatggaagtgttctgggtgttgacaaatttaaggtccggacccgcatagccgtcaaagctcaccatggcgtcctggcccttatcaatataactgggcgcaaaactgtggaaattccgctccgttgtcttgtatcctgagttgataatggcatggtacagcgtggtggaaacctggcacacgccgccgcccggttcctctatgagaactccgttcctgtaggcgcctgcgggctggtatcccttttcgctggtgcggttgcctgtggccaggttaaaggagaattcctctcccggctttaacaccacgccgtctatggcgtctgccgccagccggatattctggttcctgttcttgttatccgtggtggtggtggaaaaagtcccaatcactttgtactggtccctggcctgggcagcggtccgtttgggcgcgatggaatcaaagggcgcctctgtctccgtcgtaaattctccctttctgactgcctccatcagctcctccaccagctgctcctgcttcaggctgcgcccataccgttcctctgtatagcggtaggtcttagtctccttgtcaaaggattccatctgggaatccactgcccctctgtcccatccctgggccagctctgctgcctgctgcgcaaatgcctgctccatccggccataatccagttcatagctctggggcttatccttatccccgtgtcctatggtttcaagtatctcctccagctgagggcctgccaaatcttccagggaaacactctcttccccgtttctgatcctcatatcccagcggtatgtttccctgaccctggacacggcctgttccatggtaagtcctgacagatttaaggttcctacccgcacatctttcaggaattccgtctccaaagcctctggcatctgcgtgctgtccggtgtctctatactcacctgggtacctttggcctcccgccctttttccctgattacggccgctgccccgtagacgatgacagcagcggccagagctgacaggatccatgccttttggaccgttacccttgtccttctttggtattttcttcttatcgctctggctctgcttctgttcatcttactatctccgttttccttccattgtctgttctataatgttcttcatcatatcctcgttcagctgaccgctggcataaccgaatacgttcccgtccctgtcaatcatgaatgtggtcgggtaggaataaatgccgtatgcgctgaacagctcgcccgttgtatccataagcaccggatatgtgtatccgttctcatccaggaattccttgattccttcttctgacttttcatttccatatcccggtcctgccactcccagtacgataagggcgtcatccccctctgtatcataggtctcatatattttctgtatatccggcatctctgcccggcagggaggacaccaggtggcccagaagttcaggaatatggtctttcccttgtaatctgacagggaatgtgtattgccgtactggtccttaagggtaaagtcaatggccggaagcacctcctgtgctcctgcttcggcctggtcttccccttcttccccgtccccggctgtttcctccagtgcattggccttatctgcttccgtagcttctgtctctgccccggattcgctgtcagcggattccggctcagtacctgccgtcatggccggagttttgtctccaccctctcccggctctttgctgccctggacggatgactgggtctggaatctggacagatatcctgtcactgcgttcatccttccggtaaacatcagaaggcccatgaatatcatcagaatgcctcccacctttaccgtgtattttaccacattgccatgggtcttaaagaattccagcaggctggtggtgaaaagtcccactgccaggaacggcagtacgaatcccagggtatagaccccaatcaggccaaaggccaaggcctttgtgctggcagaggctgccatcagcaggacgctggccagagccggtcccacgcagggcgtccacgcaaagctgaaggtaaatcccatgattaaggctgttatcggcgacatggccagcatatccagcttaaaaggcagcctgtgctcctttcccatggctccgctcttaccaaaaaatcccagctggtaaaatccaaagagcaccaccagaattcctcccactctggcaaagagaagctggttgctcttaaagaaggttcccaatgtggagaaccccagtcccaggaggaagaaggcaaagctgacgccgatgacgaaacagagggtgtgaagcattaccttgctccgctcatagtgcatgcggccgtcctcaccgcgcttgccggttccgccggaaagatacccgatgtataagggtatgaggggcaggacgcagggggagaaaaagctgaccagtccctgtatgaataccgtcagagccggtacactgatatctaatgaaaatcccataggtgtgtctcctttttatgttttctgtgtgatgtttttcctgtggtttatatgtgcagcatggtatctttttctataatgcctttctgtcatgccttgttatcataccgcaaacaaatcattgaaagcctcgctcatagtgggatgggtgtagattgtatccctcagcacctgatacggtacctttgcatccatggccagcttaatcatattaatcatctcataggattcctgacagaacaggtgggctcccaggataagtcctgtctcctcatcaatgactgcctttaacagcccggccggctgttccagtacctgagcctttggaatggccgctgccgccagcctggccaccttcaccttataccccttttccactgcctctttttcacttaagcccactctggagaaaggcggtatcaggaaaacgctgtaaggcactgcccctctctccttcaatgtatagcttccatcccccaggacctttgactttacgattctaaagtcatccagggaaatgtatgtaaactgcagaccgcccctcacatcgcccatagcatagatatggggcgccgtagtggtgagggaatcgtctgtgacaatcccgcctctgggcccaatctccacaccggctgcttccagattaagtcctgctgtgttgggcctgcgtccggtggctaccagaacagcctcggcttccagcttttgaacttcctttccgttatccactgccaccagagctttgcccccggcctgctccagagccttgaccttgaccccggtcataacacggatgcccctggactccagggactccctgacagctcccgcgatctcctcatcttccctgggaaggaatatatctccatcctgaagtatggtcacttttgagccaaaacttgcatagatggaagaaaattctactccaatgtaaccgccgccgataataaccagcctggaaggaagttcggtcaggttcagcaggccttcactggtataaacataaggattcccttttaatccctcaatgggcgggatgaaggcggatgagcctgtgttaatgaatatctgctctccttccacctggaaggtccttccgtccttctccacctccaccacatgaggcgactggaaactggcggttccgtcaatcactgtaatattgggattgctgtccagcttctggtagttctttccacgaagcctggctgtcaggtcttccttctgttccatagcggctttataggcggcagccttctcctcaaaggaacctcccttggcagctgccagccctgccctatacaccagcgatttggtaggaatacatcccacattaatacaggtgccgccgtacatcctgtcagacttttcaataagggccacttttttgccggccgccccaagggctcccgccattgtctttccgcctttaccaaacccaatgataactgcgtcatattttgtcctgttctccatcatattctccgccatagcgattctccttatctatatgtaatatcatttgttacagttcttactgtaactatacatgatacagttatctttgtcaagcattttattttactattttccgggtacttttgcaggcaggacgcatcctgacaaattttttaagagatcacaaaacagaggcagtccatatgctgtttgcagaatacaatatgaaagatgcatttgtaactataaaaggagccgatccccctcacatttatgtgtaccgtaagcgggcggctccttttgtcaatttcttaatcttctaacgcctggcggatatcctcaatcacgtcgtcggcggactccagtcccacgctgaaacgaatcatggacgggtccacgcctgcctccaccagctgttcgtccgtaagctgacggtgggtatggctggccggatgaagaacagctgtcctggaatcagccacatgggtttcgatggagcacagcttcagcttatccatgaacacggaagctgcctgacgcccaccctttaaaccaaaggagataacgccgcaggtaccctttggcatgtatttctgagccagctcatagtacttatcccctggaagtcccggatattttacccaggccacatcttccctggactgaaggtaggaggccaccttaaaggcactctcacagtgtctcggcacccttaaatgaagggtttccaggccaatattaatcaggaatgcattctgaggggactggatggaacccaaatccctcataagctgggctgtggccttctggatataagccagcctgccaaatttctgggtatacacaatgccgtgatatgactcatccggctctgtcaggcccttaaatttgtcatgatgggcctcccagtcaaaatttccgctgtccacaatgcatccgcctactgtggccgcatggccgtccatatattttgtggtgctgtgcgtcacaatgtctgcgccccactcaaagggacggcagttaataggggttgcaaaggtattgtccacaatcagaggtacaccatggctgtgcgccagacgggcaaacttctcaaaatcaagtactgtcagggcaggattggcaatgctctctgcaaataccactttggtgttaggcctgaacgcctttgccagttccgcctcatccgcatccggattcaccagagtgcactccactcccatcttggggaaggtaacggtaaacaggttggtggaaccgccgtatatggtggaggagctgattacatggtctcccgcctggcagatattcaatatagcataaaaggtagctgcctgtcccgaagaagtgagcatggcccccaccccgccctccagctggcagatctttgatgccactgcgtcattggtggggttggccagcctggtataaaaatagccgttttcctccaggtcaaaaagccgtcccatctgctcactggtggtatatttaaaggtggtgctctggtatatgggaagctgtctgggctcgccgttcttcggctcccagcctccctgtatgcagattgtgtctaatgattgtttgctcatgtttcctgtgtcctccttatggtcaggttctaaatggtgatgagattatattccttattgccaaggcccagcttcacagcatggtcaatacaggtctcccagttggtatccgggtgcgtattgatgaaatggtcatggctgtgatgatcctgctccgccagaaaacttccggcaagcacgggctggctgtttaccgcgtccacacaggccatgtccagggctaccgggtcaaatgaagcaaacatacccacgttaggcacaatgggggcgtcattctccgaatgacagtcgcagttgggggatacgtccaccacaagactcacatggaaattcggacgtcccttcagcactgccagggtgtactcggcaatcttccggttcagtatatcattggcctcgtcgcacatggagtccaccgcatccacgggacaggctccgatacagcggccgcatccaacacacttgcttgtatcaatggaggctttgcgttcaaggaccgtgatggcgctgtgggcgcagtttctctgacaggcgccgcatccgatacatttatccgtatgtacaaagggcttaccagcgttgtgcatctccatcttgccggccctggagccgcttcccatacccaggttcttaagtgtgcctccaaaaccggttgcctcatgccccttaaagtgggtcagggaaatgacaatgtccgcgtccataatggcccggccaatctttgcctccttcacgtactctccgtcaatgggaaccagggcttcatccgttcccttaaggccgtcggcaataatcatatgacatcctgtggtaaagggattatagccattctcataagcagcgtccaggtggtccaatgcattcttccttcttcctacataaagggtattgcagtcggtcaggaataccctgccgctttgggaccggattaaatccaccaggaccttggagtagttggcacgcaggtaagccaggtttccgggctcgccaaagtgaatcttgattgcagtgtatttgttgttaaagtcaatatccatcatgccggctttttttaccagcctctccagcttctgcaggagattttccgtaagtgtagtcctcatgttggtgtagtatacatttgatactgccatgatgtcctccttctaaatcattatcccgtttattatacttcaaaccctgcatttattcaatcctgtatgtggggacaagggcaccaaattttttcgggtgatcttttcccggattcttcgtacaagttttaccacggcgccacaatatcatcggcacaaacagaaaaaggaccctgcgttaaagcagggccttctgtacagcttcatcgtgccgtgatgatggaaccggttatattcctttcagctttttccggtaaatcagataggaatacacacttggaatcaggaccatagccatgaaaaccaggaagaacaggtatgccagatgaaagaatcccataatcagcatcagtatgccacctgctgtccatacataccccgccaggcggtgggtcctgttccagttatcctcatcagccagggtccacggaagtttgattcccatggtataattctgtttgcatttgggcaggtaattgcctgctgccacaaacatcaatgctatggggatgcttattacgcttcccacgttgatttccataccgatgccggacaggacaatcactaactggaccatcaccgccagcagcaccacaaaccagcgggtaatctgcttcagttccctggaacggctgatgttttcatgtttaggatcaatccggtaaataatattcaccaggactgccatgagaaacataaaggccggtatgccgaaagcagccatattgcggctggagtaaccatctgccacattgtcaaatccccagtgggtgggaacctgagccggcaggcggttataaaaacagatggaaatgataaagggcacaagggccgtaagccagtacattatatcccacttggagatcttcctgttattttttttcatgtttgtcttcctccattaatgaatgcatccaggaaagaacttcctgaaatacagtggtattaagctcgtaataaatatatttgcccgatttccggtcctctataagtcccgcctgcctgagtatgttcaggtgatgggaaatagttgctcctgttgtgtcaaaatgttccacaatctgtcccgcggtcatgcttccctgctttaacaggttaagtatctcgcggcgggtggggtcggacagggctttgaatgtgtcaccgaaggacatggacaaaattcctcctttcgctttgcctgattttatgtatttttatcgtggggtggggagcggctgtatgggcggctgcaaatccggcttcttcccatttatacatttagatgtttatcaaaacatctaaatgtataataacaaaattttcgggatatgtcaagagggaggaaagacaaatgcccgccggacatcaatcccgggcatttgtctttcctcccaaataagcagcagcagctctgctgtcgtcttatttttccatttcaaccgccagcttcagattagccttctcatattcattgaacacgcctgtgtcaaaggaatctgcggggtattcccctgaataccaggtaaatgtgctgaaaaaatcattccagaaatcactcttaaaaatatatccatggcgggcgtaaatctcgttgcggaataccgctgtcagttccggtctccagctaatctgctccatttcctccatggaataatatctggcatcggaatcaaatacaggactaccatagtcatcaggcactgcccccgcagggtatatgcctgtgccgccttcctcaacctccattttgtaagccgatataacgtaatgcagtgcttctgccgtaggggcttttgcatcctccttataggagccatgataatcccatatgatttcattggataaaaactgatatcctttggacacctgcttcagggttactatgctttccagattaaactggctgtatccgtcggaaagacaccgtatcctgtatatcccgccatccacctcgccgccggggcagaagaaacttcttatgttggtatcgccgtgttccgcataataccggtcatagggagccaggtaaatccacccaatccctgttttcatctgttccagcgtcagtccggttttctctgtgagaaacccgttcatctgcttcgtacccagcctcaccaggtctgtgtaaagctccggctgtccaacggttttcaggtacatttccctttcttcctctgttaatggggactgttccaggccggctccggaataaaacacttcattcaggtttatatattccgggcttttgtagtctgacataagaaatccgtagttgtcgatccggttcagatattcctcaaaaccgcgcagctcctcttgcgtcagaacccgccttggttcatcttcccagggttggtctgcgtcatgatccgggacagaggaactgtccggctccccgttaccttcctggctgccaaagctgtccggctccgccttaccttcctggctgcccaagctctccggtgcgctggtattatcctgcatcccatgattttccgcgcctgccccggtattacttatatgactccctgtatctgcgcggcatgccgccagacccagcattgctgacaggataaccatggccagcactccttttaggcatatggttatgatacgctgctttttaatccatttcatgaaacattgccctccttactgcctctgctctcatcttttttcccgaccgacgctgccttataggcccgctttgcctcatacatggattcgtctgcatgttttaagaggcaggctgtatcggtgccgtcctcaggataaaaggcgtatccgtccgaaaaacgcacttgtatgcgttctccgttatccagctctgccgtacatgtttccatggtttttctaagcccggcctcatattccatcaattggtttcgtgaactgcatttatataggaacagcgcaaactcgtccccgctgaggcgggctgcaatgcagttgctccagccgcagcctttgagcaggcccgcaatggctgtcaggtaacggtccccattttcatggccgtacttgtcattgacctgtttcaggttatccgcgtcagccatgagcatcatgccatggtctaactgctccggctccctgagcagctgttccatatggcggtaaaatgcccttctgttgtacatgcctgtcaacaggtcaatgtcccgctcacgctcaatctgcttcttctccataacatcatctgtcacatctgcaatcatgccgagaacactgttctcccgctcaaaggattccagtcggatatagtgcaaatcagagccctccaactggtaaattctctcttcccgctccaccggacggcttctcaggtcatccatcttttgctcgaataagcaatggtctgccagaagctcctctgcttcctggtccttaagcctgaggatgcctgccagacggctggtcgccatgacgcgcttcatatcccggttatattcatatacgcctatgggaaccctgaccatctccagaatttttgatatcttgttggtggtatccaaaagactctctaccattttgttgatttggaagctcagttccctgaattccggcgtgctgtccacctctaccctggtgtccagatttcccttggttatttttaccaggttattgtgtatggaggatattccttccagaatatagcggtctatgtctttggaaatgaacgtgatcatcagcagggacagtcctatgagatatactgccaccataagggtgcttctgttcacttcccggtacagtgaagcgctggtagcggacatgcccagtataacggaattgctctttccaaaaacgcagtagctgtccttctggtttaacactgccctgactgcccggttggtgacggacagctggtccgggtgaagtcctatctcctggatttgttttcccaccagtgtttcatctgtggatcccagtatggtttcgctctcaggatctatggcgtatacggtggagtccttttctgatgtgaccagggagaatatgtaggacagctcggtcagcttcatggaatccaaaaccgttgtcggctctaaacctacctgtatgatgccctttctgtcttcacgccagaccgccgcatactgcatcagctttccctctgctgtgttgggggttatgtcctggcacatctggagatcatagttctctaacattggcaggaaaaactgcatttgctggccggagttaaagttaaggccaaagtatttgggctcggatccggcgtatagattgccttttgtgtcaaataagtggaactcgtctacctgcagcaggcgggctatcttttccatctcctgctggtctcccgtgacctggggacggtcctgcaggatgtaggcgattgctttggcccggatgaaacattgctctttcaggttttctctttctttttctgcctctttttcgttttggtccagtatctggcctacctgccagaacatttcccgggcgctggtatacatttcgttttgggcattgtggatttctatgtaatagttgatgaggagggtggtcagcatggctgtcaggattacgatgcatagccgcttgcggataatctgcttcatttgggggcgccctccttttctttagatggttgggatttgggggtggtggattcgggggtgggtaggtgatggggtgggtgggtgatagtgctctgagttataggatagcatattttgggtggggggacaagaggggacgggggttgggttgggtgataattattttatgggggtggagaatggggtggaatggggtgggctgcctggccgggggccagggacgcttgggggcggtattaggtatgggagggagcggagccgccgggcggcagccctggaaacgcctcggcgttcccagggctgtggggcgttcgccccataaaaagccggataaaaaaccaggggggaagagataatgcattcttcccccctggttttttgtccggcttttgcccggctcattgctatagcattttttgcatctcgtctgctacaaactgtactttggttcctactattacctgtacagatgtcttgctgggcctcatgactccggctacgcctgcggattttatctttttctcatctactaatgtgtagtcttttatctctaatctcagccttgtaatgcagttgtctaatgttactacatttcctttgccgcctaatccttctaatataatggctgctaccttggtgaaatcgtcgtttgctaatacagctgtcatttctgcgtctaaatcttctttctcacgtcctggtgttggaaggtcgaatttggtgatgacggcgcggaatactacgtagtagataactgcgaatacaacaccctgtactaacagcataaacggctggttggccattggaagcctgcagctgaagatgaagtccgttacacctgcgctgaagcagaagcctgcggtccagtggaatgcggctgctactgctacggaaataccggtcaggacggcgtgtacaaggtacagtccgggagccaggaacatgaaggagaattccagaggctcggtaacgcctgatacgaaggatgctactgctcctgcaatcaggatacctgccgcatactgcttcttctctggttttgctgtctggtacattgcaaatgcagctgccggaaggccgaacatcattaccgggaagaatcctgcctggtacataccggtaactcccttgattccgccttctgcgaagccccagaatttgttgatatcagcaattcctgcaatgtcaaaccagaatactgcgttcagtgcgtgatgcagtccggtcggaatcaggagacggtttgcaaatgcatagagacctgcgcctacaggaccaagtcccatgatatgctcgccaacccatacaagggcgttgaacagcatcggccatacaaagtacaggatggcggactctgcaaccattacgaaggatgtaacgatgggcacacagcgctttcctgagaagaaagcaagtgcggtcggcagctgcgcgctgctgaacttgttgtaacaaacggacgctgtaataccggaaatgataccgataaacgcgttgtcaatcttggagaaggccagaggagcttcttctgcgcccatcattgtggcaacaactccgctgttaagtactgtggtgacagtcagaaatgcaaccaagcctgcaagacctgccgcaccgtgctggtcctttgataaaccgattgccacacctactgcaaacagcatgggcagcttgtcgattacggcactgccaatcttcaccagcgcaaaaccaataatctggatgataccggttacgtcaccgccctgcatggtggcaggacacatggcatagccaatacccatcataatagctgcaaccggcagaacggcaacaggaagcatgatggccttacctagtttctgcaaatacttcatcataacataaatcccctttcttttttagagcctccttctatacttttcccgtaggagtactctgaattacattttgataaatactctattcaaacctgtttccaggcttaaatcactgttacatttttttggacagtttccgcgcctgcccgccggtccccgccaatgtgtcaggcaccggtttccaggacagcttccacttctttcatggcagcttcctcatcgggtccgtcgatgcggaagatgacctcatctcctgccgtggtgttcatggccatgatgctcatgacatcctttccgtccgccctgcggtccccgcagatgatttctacggaggagcttacatgaagcatcctgaccataagcatggcggccggccttgcgtgaagccccatttcgtcttttaagataaagctccgctctatcaactcatccccacctttattccttacagtttgatgatggctgtctctccggcctttacttccattccgttcacacattccatcttcgggaactggggcgtgttgcagataataaccggtgtagtcacatcatagccagcttccttaatcttatctatgtcaaagtctaaaaggaggtcgccctgctttaccttatcccctgctgccacatgagcatcaaagtactgccccttaagctgtaccgtgtccagtccgatgtggataatcagctccgcgccgttgtctgtctgcatgctgatggcatgctttgtgtcaaataccatggtcaccagtccgtctgccggcgcaaccaccctgccgtccgacggtatgactgctgttccctttcccagaatctcctggctgaaggtggggtcgcttacctggctcatgggaatggctgttccattgaccggcgctgcgattatcttctcttccttttcttctcccccgaataacttcttaagtgatccaaacatccttgctgctctcctttcacgtcccccaagggacctgtcaaaataattatttagtcctgatacgtttaatgtgcagggccaggtaagccacttcttcctctgttacctggtgcctgtactgcagcttgatgagcgcctgtattttctggctgcaggcatattcctccggatacagacggtcaatgacctcctggaactccaggttatccagattcatatgctcccctgtaaatacccgctgggccagaaagcgcagatgagtgatgaacctctcatagctgagggactgctcatccagctctatactaaaatactccctgaccacctccaatacctgctgtatcagattggtgatcttaattgtatcacccataggtgcatcatactccgcattgacgatgtgaagggcaatggaagctgcctcgtccaccgggagctttactcccagatccctttcaatcatggcaatggcatattcgccaatgagatattccgcgtggtaaaagctgcgtacctccctgattaagggattggaaaacatcatcttctgtttgtaccgctccagtgcaaagtttatatgatccgtaagggtgatatacacatttgggttaataggccggttaagaacctctttggcataaccgatgatttctgccgatatctgtacatgctccatgggaaggttctccagcagttccttgaacttatccatggtgttctgactctccaggcggaatatcttctccaccttttcctcgtcaatggtactgccttcctttgctttgaagccaacgcctcttcccatgacgatgatctccctgccctcttcatcgcaggtgctcactacattattattgattattttcgctattttcataattgctcctgatgaaaacaaaaaaaccaactttgttaaagagacccatgtgcgcatacgcacgggtacacatcatccccttaacaaacttggttttgcctgccgaacagtaacaatccttattaattatttaattataacttccaaagatttacttcactaacagcatcatagcaaatattaagataaaagtcaacaatattttatataatttttatatttgcccccactcctgttgtcagaattcccaacacagcccttgtcatgacttgacatacatgtaaataatacctgtaacagccagataaaaccaggtggcaggattggaaaaccaggtggtgaaaaatgacagcatcatgtacatggcaatctgggcatagatcacatggcctgccggacaagacatcttccgcctgcgccttaccagaaagtaacatgcagctcccaggagcgcgcccaaaagcaccattccgaaaatgccgaaatcatagtaggcatcatagaacagggtaagggtggtcagctccttctttgtcacaaagagaggaaagctcaccaggaccgggaacaggaatttaagccccgtaagagcccacaccggaaacagcatgcgaagcccaaagctgtgggattccagctgctccaccagacagttaaaattatcatagttattggcaatatacatatagggctgtgtgatgaatatcggcatatggctgttcttcatctcaaaaatgccgttcaggtattccacgctgtggctgcgcataacagttaagagcagataggccggaatcatacaggccatcagcacgcccacatagaccaggctgaaggtgccgctcatggaaatataggtaaatgcggccatgcccacggccagaatcagctggaacctggacacgcaaagcaccggcacggccagggacagcaccaccataagcaatcccagccagaatccctgatctctggtcagtcctcttcccctgcgggatatcataagactgtacaccacgaacagactgggcaccagcacgcaggaaaccgtaaaataatggacaccgctgacatggaaataggaataggcatggggcacaccgtatgagaacagcggcacaaagcccagcttccacgcctcaaagaaaaaagcgaggaaggatatgaccaccagcgccgccatggaatggagcagccgctttgcctgcagcggagattcagccgaggcgtaaaaacggtatacggactgcatgtccgccgcgctccatccgtcatatatcctgtgcagcacctcaaacacaatccagaaggtgagcacggccagtcccaggcagacccatgtccggaggtcccaatccgtctgaaggcggctgagcttaaagcaggatattccctgcccgcccacaaaaaagaggcagaaaagcccccgcaggtgaatcaggttgcccgtctccctgtaatcctttatatacagccacaaggctgctgtaattaaaaccagcccagacagcatataaaaatgctgccgggccaatatgaagcttatgatataacaaaccagataaactgccattaatctgtaaccttctccacaaaatctctcatgtattgttctgtttccgctgcggtggcaaagctcatagccttgtcagccactgcctgaagctcctccacactgtactgggtaaccatcttcctggctttcagaatggcggatgcgctcatgctgaattcattgagtccaaatgccagaagcagcggaatcatcatggggtcgcttgcagcctcgccgcacatgcctaccataatgcccgcctcacggccgcaggcaatgatatgcttaatacttctgagcacagccggattaaaggtggaataaagataggatacctttttattgcccctgtcaacagacatggtatactgggtcaaatcattggttccgatgctgaagaagtccgcttcctttgcaaaaatatctgcaatcagggaagctgccgctgtctccaccatgatgcccacctggatgtccttgttgtatgcaatgcccttttcatccagctccttcttgatttcctccacaagcgcctttgcctgacggtactcttcaatgcaggttactaacggaaccataatacggatgttgccgaatgcgcttgcccttaaaagcgccctcagctgcggcttgtacacatcctccctgcggtccaggcagaaacggattgcccggtagcccagaaacggattctcgtccttctccaggcccatgtacggaatctccttgtcgcctccgatatccagggtgcggatgataaccggctttccgttcatggcggccgccaccttcttatatgcctcgaactgctcttcctctgtaggcatggcgttcctgtccataaacaaaaattcggtgcggaacagtccgatgccctctccgtcatactggagcaccttatccacgtcctcgggctttccaatgttagccacgatttccacctgcacgccgtcctttgtgacagaaggcttgccgatatactgctccagctccttcttttccgccagaaactgctttctcttctcctcgtaatcagccgtcacagcctggtccgggttcacatacacttcgccggtgctgccgtccagcaccacctggtccccgtccttgacgccgtccataaagccggtgacagccaccacagccggaatctccagtgctcttgccaggattgcgctgtgggaggtcttgccgcccagctccgtgacaataccggttacattggcgggattgattcccgctgtcatggatggggtcagatcctttgccactatgatactgccttctggcagggaggaaatgtccacagactggattcccataagcatctgctgcatacgggtcttgatgtcgcgcatgtccgtggctctctgctgcatcagttcgtctcccatggaggcaaacatatccgcatacatattgcacacattctcaatggcgtattcactgtttacgccgtcattcctgacggagttctctatctcccctgtcagcattgggtctgccagaagcatcatatgtccctgcatgatttccgcttccttctctcccaccctggttgccaggtcctctgccagtttctctgtggccttgatggtctcgtccagcgctcccttaaaacgctgcacctcctcttccacattgtttaccgcctgcctggtaatcaccagctggacttcctccacaatcactgcttttccaattccaattcctgcagaagcgcttgttcccttgtacatcttcttgtacctccttattaaaaattcatttatactcacaacctttggttgccgtcaatctactcgcctaacccggcctccacgataccaaccatggcttccagtgcttccatctcatctggcccctcacagacgaattcaatctcgtctccagatttcacgcaagccccaaggacgcttaatacactcttggcattggccgtggtggtgcgcaccttgaaggatatttttgatttataacgcagtgcctccttgcagaggactcccgccggacgcagatgcagaccggatggattcttgattacagttgttttgcttaccattatgcctctctccttgctttttgttactgaccgggctctgccttggacgtactggcaggaccttctgatgtctcactttctgtcccttcctggctctcatctgtactggccgcagtactgtcagccgacggccctttttctgtcacagtcacctggatacggtcgtagctcaccagttcataggcatcgcccagctggaacgtaatctccccgctgttctctcccggaaccatatcctccacatccatctcagcgcccagagcggcagccgaaagctggtccagatcttccttcaggcctcttatgaccacattcacagaatccctgtcatactggtattcataatcgctgtggtatcccacccgcttaatctggcttgttttaagctcaaatgtcctgctctccaaagcctccaccttgatgacaaccttcacctctttggatgactcgtccgaaaggtacactccctccggcagatactggctgatatccagggtaacttccttatcccctgtggctccgtccatattcagctcagagcttgggatggtaatggaattaatattggccaaatcggatttcagaccattgacagccacagaaggacggctgctctctatccccgtataccggtatccgtccgccaccctgccctccggctcaaagttcagcaccaggctcttgcgcttgagaatcggcatggtataatccacactggagcggctgaatgtgatgcgctcgtcagtgggtatctcattttcattggcgtcaaagcacaccacaggagcgctgtctgacaggttggagtcagcgccgtccacattgatcacaattcccaccgcgctgatctgccccaccacggacatgggaccgctgacatttatataattcggtgaaacagaaggtgttcccttatcgtatccttcggcagcttcccccatgaccttggccctaatctcaaaggacttgcgctgcagatcctctgtcttgacgcggataactcccggctttgccaccggagtgtccaaaagacgtctgttgttcttaacctctatcttcaccggcactgcgcccgtgggttcatatatatcggccaaatctatataggccctgaaatccgaggcactgatgcctgccttatccagtgtccttacacggtagctgacggtaacagtatccttatccgtcagcagctcatatgtcttgccgttggatgtcaggattccttcgttgacaatatctaacggcacctcctttgaatctgagtcctccgggttattgatattcaccactgccagccaaacaaaaaatgccaggaagacagaaagtactttaagcccaatattgttagacagctttttttccattcttcagccttcccttccatattttcaatcggttcaatgaaacagtctcctctttcacattggaaagtacctttttgaggctttctgcatctggtatcctggacagcactcctccttctgctaccgatacccttccggtttcctccgacaccacgatggtaatactgtccgtggattcacttacacccacagcggccctgtggcgcgtgcccaggtccttgctgatgctcatgttatcagtcagcggcagataacaggtggccgctgtaatgcggttgcccctgataaccactgccccgtcgtgaagaggtgtgttgtgttcaaaaatattaatcagcagctggctggtgaccaggccgttgatttcaattcccgtcctctctatctccttaagggaagaaccgcgctcaatcaccatcagggcgcctgtctttaccttggccatctcaaaggtggcccgtaccagctcgttgatggtcttgtcgttaaagccctggttatccttgccctcgtcaaaagaaaagagataggacatgtaattgcggcttcccagctgctccagagccttgcgaagctcaggctggaatataaccagaagggccgtcaccgcaatggtagtggtattctccagaatccacaatatggtagtcagatgaagcacggcggcaaacagcacaaacaccaggataaccagaagtccttttaacaggttccaggccctggtgttcttaatccacaccagaagttcatagaccagaaaggaaataatcacgatttccagaatattccccactgatatccttggcagcagcgacagccaggatgtcacttttaccagtatttccgccatactctcacctccttacgttcactttttttcattaataagaatttctctcccttgtgccgcgtttatgggtactgattttctgtaccttcacatccggggtgctcacggtcatcttgggcaccgccttcacataataataataatcatcgtcctcgaactgcacatattcggtccgggtataatccacagacaggacaaaaaaattgaacacagccgctatggctgccgataaaacaagtcccagaatcatctgacccacgggaacagataccccaaacacgaaatctcccacaaatatggccagaagctccgccacggcacctgccacaatggcaaccacccatgcgtaatccatagacagcctgcgtatgagatacaccacaatgattcccaccgcgcaggtggcaatcataaccatcatggtctggttaaagagcacggatttaagaatctggctgtatttctgtacaatatccacggagccgtcgctggcagccaggatgcccgcattctgcttcacatatatgagcaggtaatacaggaacacgccgcatccgacgggaatcacagatgccaggcttccacccagtccaaccagcaaaggaaccacatagggaatcttaaacaggaaggcaaggggtgtcagaaccatcagataactgtccccgggcttgaatccgtagtaaagaatggcaatggtcagtatgagcacaatggcaatcagggccatctccagtgaaaccgcatatacatgggcaatcatcaggcagcccgccaggaacacgatggcgccgtaaggcaggaatgcgctgaccagacagaccggaagaataaccaaaggacttttaagctttgccatatatccgatattcgtgttaaggcttaccatggtgcagagcgcaaacaggaagtgcactaccggctgtattccgtaactgtagcggttgtaaaatcgtttcagatgttctttccatagcagaagacttgtcatcgaacccttcctcctctgttgtccttggtcctgtcggtcctgtctttgttgtcgtacttcttgaccaggtgtctcagtctggaggcatacatggtctgggaacgggacgcgtagtcgtaccttttggaatatactatccaggtcacaaacaggtaaaacgccagtccccccacataaaggatgccccagttcctgccgcactcaagcagttcttctatgctcatgccgcccaacagcacgtccagtttgtagaggatccacagaagcagcatcagcaggtagcagaaggtataaccgaaaaaggagcggaacatctgtccgccgacataatcctttttaaaataacggttaatgggaaatatcttcctgccctcattcttttcaaatatggccagcccagtcatatatctgaccttttcttcgttcagcatacaggtacctcttaggctttttcataacatatcaatttagtataccacaactttttcagatttgcgacactataaatcaatttttatgattttgtaaggaactggaatttgccttaagaaaccgccctattttcccaccagcaccaccacggttctgggacgaatcctgaatccgtctgcccccaggggacccggacaaggcgtatcctcccaggtgtctgccgccagctcccatttcattccgtccggtagtacaggcagctccacatcaagctcctcccaatatgcattggacgcaatgtacacggtctgagggccttttccctcctcccggccggcaaacatgactcccacatagcgctcgtactccgcaaaggaactgcaccagggctttactccgtgaaagctcacatccgggaagccgcaggccccgccgctcacattggcgcgcaccaggcggtgggtcttacggaaccgtatcatatattggaagaaactaaatatatccctatacttccccagccgtccccagtccagccatgaaatctcattgtcctggcaataggcattattattgccgaactgggtgttgcagaactcatctcccgccagaaacatagggattcccctgctgcacatgaggagggcgcaggcgtttcgcaccatgcgccgcctcagggcttccacctgaggatcgtctgtttccccctctgtgccgcagttccagctgttgttgtcattggcgccgtccgtgttgttccatccgtttgattcgttgtgctttacattgtaggaaaacagatcgtaaagggtaaaaccgtcatggcaggtaatgaaattcacggatgcgttcttcctgtcatggtccgcatatatatccctggagccggcgattcgcagggcagccgcctgcgccatgccctggtcccccttgatatggcggcgcatatcgtccctgtacctgccgttccactctgcccagcggttccaggacgggaaggtccccacctgataaagaccgtccgcatcccacgcctcggctatgagcttgacatcgcccagaatggggtcaaaggcaagactctgaagcaggggcggcttgctcatgggcgtgccgtcctcgttgcgccccatgatggaggccagatcaaagcggaacccgtcaatccggtacgccgtaacccaatagcgcaggcagttgagaatcatctgctggacaatgggatgattgcagtttaatgtattgccgcagccgctgaaattgtagtagtatccctcaggagtcagcagataatatatattattgtcaaatcctttaaatgaaaagaagggcccgttttcattcccttccgccgtatggttgaataccacatccagatagacctctatcccgtgctggttgaacacctgtatcaggtttttaagttcattgccctcccggttgtactctgtaccggccgcgtagctggtattgggcgaaaaaaagcttacggtgttgtatccccagtaattataaagcttacggccgtccacctcccggtaatcctgcatctcgtcgaattcaaatatgggcatcagctccaccacgttcacacccagctccagcagatagggaagcttttccaccaatccctcaaaggttcccggatgaagtacggctgaggatccgtgcatggtaaatccccttacatgaagttcataaatgattaaatcctccatgggggtcaggggctgggccatatccgcccagtcaaagtcatccctgaccacccttgccttatagtgctggcatcccggcagcggttccccccaccggctctgtccggtaaccgccttggcatagggatccagcagatacctggtcttatcaaatataagccctttttccggttcatatgggccgtccacccggtacgcatactcaaattcaccgatatccagccggaacacaatcatggagtacacattgccgatgcggtaatgctttggaaagggcaggaccgcataaggctcctcctctgtccgccgaaacagcaaaagctcaatatctgtggctccatgggaatacactgtaaaattgactcccccgggtatggcggtggctccgttgatctcatagaatcccggcctgaccgcgtatcctcccacgtaatccatgggtaccaggtgaatggtgccgggcagggccagatggtcgatacagtttgtttttttgtcccatgttatgccgtctgcggggccggcagctttctttcccttatcctccatacattcctcctatatgcgcccttgtcaggctgtttcaggttcaggcactgtattaacaatatacaacatcccagggtatattacaagacttggaaaaagccgccggacccaaactggtccggcggcggcttccttctgtctgtttacacgctgacagctcatcttattctatttctaatatctctcccactttatcttttccatgggcagctcatccaattgatgggcaggcgcctctgcatccggcattccaagggtaaggatggcttccagcttataattttccggaaagcccaggcgttcccttacatattcctccgtggttatctcatccgcgttcctaagcctgccctggacccagcagctgccgatccccaggctggatgccatcagatgcatgtttgccatggcaacggaacagtcctcaatccacacgtcctgctccttttcgtcgccaatgacaacgatagcgcactgtgcttccttcagcattttcacgcctcccgccctgcatccggagagatcatccaaggtctttctctggcgcaccacgataaactcccacgggcgttttgcctttcccgacgccgacaaaaggcctgcctgaagcactttcgtaagactttcctccggaatctcctcaccgctgtagttcctgatgctgcgccttcttctcataatctctaataaatccatggtcttcttcctttctgctgctgcatccatatgatgccggcttacagtttcagatacgcttccagcacatccttcatatcgcaggtcataccgtaatccgcgatattaaagatcggcgcgctttcatcctggttgattgccacaaagagcttggtatccttaatgccctccgtgtgctggatggcgccggatacccccagggaaatgcatacctttggccgtatcgtaaacccggtctgtccaatctgatgctcaaagggtataaatccggtgtctgccagaggtctggtgcctccgattgctgcttccagcttttcagcaaaggcttttaagagtgtaaagttttcctcgctctcagcgccgcgtccgcccactaccaccacctctgccgcaagaatactgtccgtatcattcattgcaggggcgcttgacatcacctgaatccctgattcaggaagggtgatatctttgtaatatgtgacatctgcccttctgccctcctgggcctcacagggggtgtacacacccggccttaccgtcatcatctggggataaaccccttcctttgtcacgatggtgacaaatacgttttccccaaaagaaggtttgttctgcttgatgaaaaaggtcccatcctccctggtatccacggctaattccgtacagtccgcagtcattccgcagccaaggcgggcagccactctggaaaaaacggagcggcccgtgggggtagccggaatcagaacactggacggttctatgcgcttcagcatttccgccattgcctggcttaccgcatcgtcctggaacaggcagttcctgtctgtctcaacggcatatatctcgtcaaacccaagctgttccagctgggccaccaaagccttgcagtcctcagccaggacagcggcctgtatcttttcaccggtggtctctttgatacaatgagctgcgcggaccagttctgccacaacgggttctaagttcccattataattttctgcaaaaacacaaattccgttcgccatctattcctttcctttctcaatctcaatcagttccttgagcttggctgccagttcctccggagtacctgaaagcatctgggctctcctggtactctcaggctgaaatgaatccgtcaccattgtgggagatcccggaagtccaatctcgtccgccgccatcttaaggtctgcattggtatatacctccaggggcttgttcttggcagctctcttggaacgcagggtcgccagacgcggttcattgcttccgaagcacacgctcaccagcgcgggcagggccgccttaatcttccactccataccctggtactttttcacagccgtgatacagtccttgtcatcctcatcatatgagagtccctgtatttcagccacatgggggatgcccatgtattccgccaccatggctcccacctgtccggtggcgccgtcagcagacaatgcgccgcttaaaatcaggtcgaattccccgtatttctcaatgcttcttgccagcaccttggctgtggcaatggtatctcctccggcaaggcaccggtctgtgatgagacagctctcatcacagcccagggccatagcgtcccttaatgctttctccgcgtcagtggggcccatggtgaacacggccaccttaccgccggtctgctcctttaagaccatggcggcctctatggcgttcaggtccgcaggattgatcatgccttctgaactggaacggatcagggcatgggtttctgggtcaacggaaacatcgttggaaacaggaacctgttttataagaaccgctatatccatattttctcctctccgccgctttcttattttaacagacgctcaaacgcccagtcttccaataaaggtgtcttttctccgcgcataatgaattttgcaaggtctctgctggcggcaggtgcctcgataacgccgttcccgccgtaaccggttgccaggatatagccctccaccggtgtctctcccagaatcggaaggaaatcctttggctccgcacggtatgaaagccaggatgataccagtccgctgtccacgattcccggtaccctgcactctaactgatctaacaggaagtcaatgaagtaatcatcggttccgcctgtggccggaagtttgtccggatcccactggcctgcgtgcataggattgcttaaatccatggaaaggtgggacttgcagataaagatgttgtctcctgcgcgcagggcgtagaaggccgggtatttaagcaccgggaaggtatagcctaatttcttgcctggagggcataagaagaaggcttctgcctttgtatgccaaatcggcacgtccatgcctaccatctcgccggtgaatttgctccatgggccggtacagtccacaacatagtcaaattcataatcctggccgtcgtctgtcttaaggccttttattttattgccctctttcagaacttccgtcacctttacgccggtcttgataacgccgccgtttttctgcatcttctttgcgtaggtgttggagatcatggttccgtcaaagtatccgtcatcctgtgtgtagcctgcgcccagaatattgtctgtggagatgtcaggaaggatttccttgattctgtccttgtccgttatgtactcgcctgtatagccggctgcctttgccagggcgatgcctgtcttaatggtggcctctaccttctcatctgttgcgaccaccagagtacctgttttatcaaatccggcggaacccttttcctctgcttccatctttaaatatgactcaaagccatacagccttacgtcccagtatctgtttcttaaggaatcgtcaaagagacatacggttccagcggactttgctgtggaagctccgccgatggtatccttctcaaacacaattacctctgcattgtcataaagactcagatgatatccgagacatgttcccgaaatacctccgccaataataccaattcttttcttttccataactttacctgcctttcacatttttatttttttatcacaaggtttatatatcatctacacgaaggactgtttccagcagcaccctgcacccctgtccgatatcccgtccctctgtaaattcatatctggaatggctgattccccccacgcttggcacaaatatcatgcctgtgggaaaaactgttgtcatgagcagtgaatcgtggaaggccccgcttgggactttcgtgtaaggaatatccagttctttgacagaggcttcaatggcatccttcacccattcggtcatgggcgccggctcatggtaggagaaccggttaaagctgtattcttcccccatcgcctcacagatttccccaaggcactctctcagcttctgttctatggtttccatcactttctcatcctggtcgcgtatctccaggtggaagaaagcctccccaggaatcacattcactgagttgggcaccaccttcatggttcccacggttgccactgtaaacggattaccgtaagcagctacgatttccggaacccgggccacgaatctggccgcagccaccagcgcgtcctttctgtcctccatcaccgtgctcccggcatggttggcctctcccgtaatcttgatttcaaaccggctcactcctgcaatggatgtcaccacacctacgggaatctgcttcttgtgaagggacgccccctgttccacatgcagttccaggaaacagtgcacagagtctttgggccgtctggcattgcccaggtcagccacctttaatccgcaggccttaagcacatcccctctggcctgtccgtacatatccaggtcctcctcgctgacatgaaggtcctgtccgcacatggctccgcttcccaacattccgcttccgaaccggaagccctcctcatccgtgaataccacaatctccagcggatggcgcagttttctgccgctctcaatcagtgtctggcagacctccaggccggctacgcagcccagcgccccgtcataccttccgccgtccggcaccgtgtccagatgggagcctgtcatgatggcaggcagtgttttatcctctccctccagtctggcaatcaggtttccggcagcatccatcttaggttctattcccagcttccggaaatagtccatgaagatctcccgtcccttcctgtcctccggcgaatatgccatgcgggtgaatgttccgtcttcctgggctccgcattggtacagctcttccagccgtccgagaaccctgtctaaattgatatccatttaacccctcctcgcttctattcgttgtcaatcttgcacacaccgtttatttctttcctgaacttcttatctatattgcacattatagataatattttaacagattgcatcggagcaaactgataaaaatggagagataatttatctagtctggataaactatctctctatggtatattacaggctgaattctcacagccgcaaccccctgctgctatataaaatccttgttgtaattctctatcatcttatacaccaccagtccaatccgcaccgccagcacctcgttggcattgtcaaaatcaatcccggtcagcttctctattttttcaatgcggtaaaccgctgtcttatagtgaacataaagatcctgggccgtcttggaaaggttcagattccggtccagatacgccctcagggtcgtaatcaggtcatccctctggggtttcttatagttataaagcttctgaagcccttccggcacatactccaacagcatggaagggtcgcttaactggcacagcagcttaaatatgcccaggtccgcaaacagcataatctgggggcctccgtcctccggcgtctctcccgccacatccacgaacatgaacgcctcgttggcttctttaaagctctccggaagattgatgatgccgtccaccactctgcctgctcccgctttgattttaagatacttgttatatctggccacgtccgcctgaacctgttccgctatctttttgatgtttttgcggtattcctcctgggtctgctccctttccacctcctgtatcaccacgattttatcgagatcgttatggattttggctttggatatacggcttcggattaaatcacttaagacatcaatatcttttacctttgccttaaagtctcccctggccatgctttcgtttgtcatgccgaacacaatcacacggtagctgccgttgatgtcgacccccagcaggctggtattcttctggagttctcccatggaatggatttttccattgagaatattgtgtataatatcattctggaacttcttctccagctccgtcaccgcgtactgtctggaaaactcaaagcgcagggccgtaatggcgctctctgcggctatgcagtccatggtcccaaagggctggtttaactctgtcaccaccaggtatatcttctcccggaaactcatcttcacctggatcaggcactgggggacctctcccttctgcctcatataggtgtaattggaataagtgcccggatcaaacggcaccgcgtccctgctgacggcgaactctcttggcgcctgatccgtagccgccaggcaggtcaggttctggttgtatacggctaccgggttgcggatcagcttggagagcacatccagtatctcatccacaccttttcctgtggaatcaggggctatggcaagggctgcgaaattgtcgtgggttgtcttaaaatacttaagcctggtaacctcctcgttaaaaagccgttccataatcagactcatgacatcccggaaggaaacctcgaacggcacctccagaaccggaatgttatgttcctgggcaaatgtaaacagcagttcaatcttggtgtccgcattctccaccttcctgccccgctttaacacaagggcactgacactctttctgctcaactcgttgatatacgtgcggaattcatctactgtacaggatctgaaagcatacagacctgtcagaagtacctccccgccgtcaataaactttacgatgtccggcgcctcaatgattgtcacacccttaatttccttgtccagtcccctgtcgcctgcaagtaccttgatatccttcatttcctctgccaaaagaagttctcttactgttaatcccatcttttccctcaccgccatcatttgtcctgccaacactacctcctaattatagcacaaacagacacagacgtataataaaatatcacgtctgtgtccttttgctatttatatgctatttcatgaccttttcttttgccagcttctccataaccactgccgctttggccagatcgctgtatttggtgaactcaaccgggcaatggctccgtccgtccttgctcggcacaaacagcatgactgtgggaagtacctgaccgatttccagggcatcatggcctgcgccgcttaacatcctcttgcagctgtagccccgctccccgcattctttctccataatatccagcatttcccctgaaagctccacaggagttatggtcagtttgttctccatgtcaaaactgccgccatactcaccaaccgcccgctcaagagcctttctgatcctgtttgtaatatcatttatattgtcgttatttctggaacggatatccactgtgaactccgctgtatccgccacaatgttcatcccgcccggtatggtgttcacatatcccaccgtagcaacggttccgtccgctttttccctggcccagtcagctattcttgagataacctttgccgccgcgtccaccgggtccatcctcatatccatgggtgtggttcctgcatggtcggccctgccgtgcaccgtcaccatgtagcgctgaatgcccacgatacagtctaccagtccaagctctgtgccttccgtatccaggaccggtccctgctcaatatgcgcctccaggaagcagccgatttttccgtcttcccagattgcttctttgatctgctccggatccataccgtattccttcatggcctcatagatggatataccgtctttgtcacggaattttttcatgtagtccacatccctgtgaccaaggatggctcctgagccaaaatagccggttccaaaccgtgttccctcttcgtcacagaatccaaccaccacgaaatctctcttaggcctgattccttcttctaaaaggagacgtgccacttcaatggcgcagatgacgccggctatcccatcatagtctccgccgttatatacagaatcatagtgggagcccatcatgacacagggtaattgggagtcctcaccctttaataccccaatcacattgccggcagcgtcttccctcacatcaagtccgctctccgtcatcagctcctttaaatactctacggcctgcctggcctcttttgtgaacggcagcctggtgcagccgtttcccggtgttgccgtaaactgttttaaatgctccaaatccctggcaatcctgcctgtaatctcctcaatcaccattagtaaaccctctctattctttatttggaaaccaacttgtgtttcctcttatttctttctgtctaatacatataccttaaacggcgagtacagcatagccgccaccagcagaataaatcccaacaggcataccccgtctccctgcatcttaagccctgtcagtatcagggcaaaggccgccaggatggctgcaaaggccactgtgagcctgcccgcttttgtcttgaaaaatttctctgtctccatatgtcatcctcctctgccccggcactgcctgcgcgtcatgaaacagccactgataaaaaaacgataataccgattgccagcgtcataatggtcgtgaagggtatgattctctttagcacctgtccctcgcttcccaggattcccgctgtggtagtccccaggatgatattgctggggctgatggcgcttccgatagaacctcccgctgtctgggcgcccaggattggcgcctggttcagatgaagcagattggctgtggttacctgaaactctccaaagagtatattagatgacatattgcttccggtcatgaacgatcccaccattcccaccagaggcgccaatatgacataagtcttgccaagtacccttgctatcccgtccgccagcacgctggtctgccctgttccgcccatgattttggacataatgaccagaccgatgatagcgattcccgacggcatggacatggttatggaacggacaaacacacgctttacgcctcccggacgaatccatccgtgcctgccgaaatacaccagccctgcaatggatgacagaaacaggaacatactggcatgggtaaagggccgcaacggcgaaaattgttccgtagcctggttgacgaatccataccccgtggaagtctccggaaaggaaaatccaatggacacctggttcaggaaacgatttaccggaggcaccaccagcaccaccatggtaaccgcagtcagcaggatataaggcacaaatgcctgtaccagcgtcatgccgtccggagtctcctccgatgtgccggacgcagcgccacggtccataatccggctgtcctccacgctccactcctgtctgtacatcttcattctgcctatcagtatcagggccaccagggagagacaggccggaaggaagcaggctatggttgtattgacccgggtcagaagcagctctccccctccctgaatcagggacaggataaggagggcgggaagccccttcctcacagcctttccttttccgtagaaccagcatatcaccagaccaatcaccacattccacatccagatgaacacacccgcccaaaaggcagccgccagatagtcaggcgtaccgggcacaagtccggtggacatggccagggcatcccaggcagctgccagggtaccgaaggtattgccccatgcctgccccaataaaggtatgatgaccgcgaatacgggaactactccaatgcccatgagcaggggagctcccactgccaccggtacaccgaatcctgtaattccctggagaaagctctccagtatccatcccagggccagcaccatcaaaagttcattgggcaaaagctttctcatcccgttgcggattacaagaaaggcccgggcttcatccgccacctggtacagaagaatcgcagtccatacaatcagcaggataataagagcgctccatattccttttgcactttccgctgccagcagcctgatatcagctttatagaatacaatgccggtaataatcgtaatggccagccccacgggggctgcttccgtagccccccactggaacttaatcattagcagcagcaggacaatgattggcagacatgccattatccacataaacagatttgttggtacgttcatattttatctcccgattacttatgtattactgtccccgtgctgccggcgattccttccgccgccttgtcaagcaaggtgataagtgtacgcctgccttctccagactgtgcgaaacggatggctgcctcgattttcggaagcatggaccccttggcaaactgctcctgggcaatgtactccttggccttatctactgtaaggtcactgagccattcctggttctccctgccgaaattgatggctaccttttccaccgcggtcaggataatcaggtaatccgcctccagctccgctgccagcaggctgctggcattgtccttgtcaatgacggcgttgactcctgagagcctgccattgtcattcaccacaggaataccgcctccgccgcaggtaatgacgatatggccggcgtccaccagcgtctcaatggtcttgagctcccggattttcatgggcatgggggaggccaccacgatgcggtaaccccttcctgcgtcttccatgcagggaatcccgttttccatgtttttccttgcttcttcctcggtcaggaacctgccgatgggttttgtgggattcttaaatgcctcgtcctccgggtccacctccacctgggagaggatcgtggatacctttacatccatgttcctcttatacagctcatacttgatggcattttgcaggtcgatgccgatatacccctggctcatggccacacaggtcggcagcggcgtttccttgtaattctcatagctgcaggccagctggtccatggcattctggatcatgcccacctgggggccgttgccgtgggtgataatcaggtccatgccctgctgcaccaggtcaacaatcacctcagctgtctttgccactgcctgcttctgctcttcgatatccttgcccagggcgttaccgcccagggcaattactactctttttttatccataaccccatctcccttacatcataagcttagtccaaagagaaccccagtttcttcgcgtatgccgcgattgccttttcaaaacatgcaataggcggatgtacggtgccggcccctatctgtccgtagccagccaccttatgggcgattcccgtattgataactggtgtgatacccttttctaccaccagtctggcatcaatcccaaggcatgttccctggaagttccagtttggtatgataaagttaggattccggtcaatggtaatctccgtcatctccgtactggtacgaagcgcgtcctcgtacccgccggctcccacgaatctggtaacggccggagccgcgatcatggccatgccgcctacgccgaaggtctctgtgatggcgctgtcacccatatccgggcaggcgtcctcaccgtcataacctgtaaagtagagtccctggggcgtgttgacaggagcggtgaaccattcatcccccatgccgcttatgcggataccgaattccacgccgtttctgcacatggcagtgacaatggtgccgtcggttacctgccttgcggcgtccatgacagccttacctgttgccatcatgatattcaggaagaactggtctgtatcagccaggaatttgatgacgtcatagcggtccttttcgtccatatccatcttggtaatcaccgggctgacctctttcaggaaagccagggacgccgcaatattcctctggtggaactcgtctcccatagcgattgccttggctacaagaggattcacattcagtccgcctatggaacggatggcccttccaagggttggtcccagcacatccttcatccacagcaggcggtcaaccacttccttggaatatgcaccgaacctcagcaccttgccgattccctcattcatggtacagtatgcctcattgccgtcggtctggttctcaaccacgaacacaggcatgttggcggaggtaatgcctcccatggggcccacggcctttacatgatggcagggaataaaggtcacttcaccggacgcaagtatctttcttgcttcttcctctgtagcggcccatccctcaaagagtgctgcgccgacacaggaaccctgtaccgggtccggcatgttctcaaaccggattggcggtcccgcatggagaatcaccttgccctcattcaattctttgatgacggacttagccggcaccacatccttgatgacaggctggctggcaaccactttggcaataacggagcggttggcctcatcaatatccatttcccggcagcttctcaggaaattcaggacctttatcagctccacgttgccccctgcgggcggcgcccagtcatactggaccacgtcacatccaaaggcttctatgacctcagcaaagctcttaaggcccacattgatgactcttggcttctgtgacagaagttcaaggagtttttccgatgcttccgttttctggatccgggctgttgtcttggggcggatttccttcaccggctcttcaaagtccagaccgatggcgcggattgccgtatgtacagccagcttattattctcacatacaatgacccctgcttccttcagtgtttccacggccttgtcataaccctggaaatcccttcttgtcccgcatacagtggccacgaagaataattttctcccttcctccctggccttgtcgcgaaggcggatgattgcagggaggagggccccggccatatcttcatgggaaccgtaacccagcatgatgtccaaaaggataacgcctgtggactcgtcgtctatcgcctcctgcatgcactcaatgcgcttggcgggatcaatcatgggatgaggcttgccctgggtgtatacatcgtctcccaggtccaccacgatatgtccgtcggtctttaacataaagccttctgccttctggggcggaaccttaaggttcagggcatccttgattaacatggcagcttcccctgccagggtgcctcctgagtagtatgccttgattgtcttcttttcctctgccgcgaagaagctggaggaatccgcctccacgctgccctctgcgatatcctggcccctcaccagccccacggccaggcgggctgcttcatccagtgtatacgcatggtagaagttttcctcatggtactccggcttctcacccaggaacaaggtgacaaccggtttcttaaagttgctcagccggtcggaaatcctgtccctcaccgcctttgccggaggcttggatatgatgatcagcactttcacggtatcatccttttccatggcctcaatcatatccatcatggtaattccgcctacttcagtggacaaatccctgccgccggtgccgatggcgtttttaacgccctctcccagacggtctatgatggtggtcagctcctggatgccggtgcctgacgctccgatgatgccgatgggtcccggagccacgtgattggtaaaggcaatgggcacaccctggatgattccggtaccgcagtccggtcccataacagccagccccttttcatgggcctttttctttaacttaatctcatcctccagcgtaacattgtcgctgaacatgaatacgttcatgccctcatccaatgcccggtcagcctccaacgccgcataagcgcccggtatggaaatcaccgccaggttggcgtccgccagctttcccagtgccttatcccaggaccggaccgcctccgctccctttttatccgactctgaagtggactgtttcttaaagaacgcctccacttcctccatgatcacgtcaagcagcccgtcgtcatccacatcagccactaccaccatatcattggcggacgcctcctccagctcgctggtactaaggccgctctgcctgtaaatatccttgttggcaggagttgccatcatgatggaaaccttctttacaccttctatggaagaaatctggttagtcaaaagcataaggactacagaatcatgataactccctttttttactatggtttttaacatacgctccccttctccttattcggcaaacctgtttttgtggtcatatttatcaaagtgtaccttatcgctctttaaatactcatagatttcatcaactatctccacgccgcctgtggcataggctttatcccgcctcatgaccgcgcgctcacccggataatataccttatcaaagccttctgcggccggcatctctcccagctcatcaagcacctttgacatggacgccttgaatgcgtctaatcccacgaatctggacggatccatgacaatgaacatctgacccagctccctgcctgccgacaggtcatggtacatcgaacttacatgcttcccaaagggaactcccagaagcacgcccgagaaaatgtccaccatcatcatcaggccgtatcccttggcgccttcaatgggtaccagggcattcacaaggctggaatccgtaaccggacgtcccttggcgtccactgcccatgtgtcgggaatggattcatgcctggagcgtttgtccagtatcttgccccatgcctggaccgttgtagccatgtcgaatacaaccgttctttcgtcagccgtgggggctgcgaaggagatggggttggtaccgtagtaaggctctatcccgccgtaaggcaccgccatcggatcggactggcagcatgcaatcgccaccagatccgccttggcggccatttccgtataataaccaatggagccgctatgggaaatgttgcggatgccaaccactgcgatgccggacttctttgccatctcgatggccttttccatggccagcacagacgctacatatccgcagccgttgtccccttcaaagacagcggaacaaggtcctgtctccctccactcaaacttcggatcaaccgtgatgccgcccttggcaatcctctcgctgtaatactccacacgcacagccccgtgggagtgataacccctttcgtcagaccaggtgaggacatcggccgtcatatccgcatgatccgccttcagccccgcctgcatcagcttatttttcattaacccctttaactcatcatgggaaagtttcatatctgcaccccgcttcttctcaatattctacagctgcacgtctctgttgcaatccttggagtaaatatacgcgaaatcctcttcacgtcccaccgcataacatgcctgcgggcaatatgcgtccaggaacatgtaatctccggcctttaccggtacccagtcattgtcagccctgtacatgcctttgcctgacaggaaatacattccgtgctcctggatatgtgtctccacgtagccgtgggacgctcccagcttgaacttcaggatgtgcatgttcatatcaaatccgaaattacctgctgccggaaggaaatccttgatgtggcagttgtccattccctcatattctgtccagggaatatcattggcatttcccactaccgtaaatgcgctgtatccctcaatcttctcatatctgcgcttatatacatacagcctggcttctttgccgctcttgttttcaaaggaaaccttaacgctctcaggggagaagatataaccgccctcggtaaggctctcttccttgtcggcattcttggcaaccacttcgccggccagtacataaataaacgtctccagaccttcaccgccaatgccgctgttttttccgccttcctttaccgtaaccagataatccgcaaaggtagctcccatggcaggtgaacccagaatggttacgtcgcagttctcataaccggggatgctgttcttaaccagaccgtccggttccagcagaacataattttccttcttgattacagaacgtgttgccagtaattcctctctgtatcctacctgatcatttaaataactcatatttacttcctcgctttcattctttgttaaaggcctttttgggtcaacttttttatatttatattattgcaaaacaacgctcttttttcaattatgtatttatgcaaatctccctatgatttttatccattttataccctattgctaattttttcacatcccacttttttccggtctcatgttataatatctttaaatataacttatctattatacaaaggagaacaccattatgacggaaaaaagagagataagcctggaacatccagcttatccaaagtatgcaactgtatattcagaaaaggatacagatgcaaaagcctgtatcctttacttccatgggggagggctgctgtacggcagcagggaggatctgcccctaaggcatatagataccctgacccgggccggatatatcatcatatcctacgactacccccttgcgcccgccgccaggctggataccataatgggtgatgtctgttcctccatcacccattacataaatcatcctgaaatgtactgcggacgcaaactcccgttcttcctgtggggccgttccgccggagcatatctctgcctcttagccggggccaaaggcaacctgcctgccgtgcccgcggggatcctctcctactacggatacggattcctgtgcgaccactggtatgagacacccagcggattttactgctcccttccggctgtagatgcgtcctgcctggaacaggccggtgctgacctccacacggccggaagcctggacacccactacagcatttatgtatatgcaagacagaccggatcctggcgttcccttctgtatgaaggcagggataaatatttctatctggactacaccctgcgcgcctgcaccgcccttccctgcccccttttctgtgctcacggcacccgtgacaatgatgtgccctacggggaattcctggagctgtcaaaccgtttccgcccatggcagttcatcgcctcctgcgatggccacgactttgaccgggatgaagaaaacccgtttacggaaaaactgctggacgagacactggcattcctggaggaaaacctgaagctgtcgccggcccagtgctgataactagccttcctgctcctggaaaatggttcctgtgcggaatgactttgcgctcttcatgttcttcatcaggaagtaatacaccagtcccgtgggaatcaggctcacataccaggacagctgtacgatgaccagagagcagagggagccgatgacgatggctatgatggctgcccagttgattcccttgaacacgccctgcttgtcatacatatgattgatattcagcttctttttccggagaatgtaatagtccactgccattacggcaaaaatcgggcccaggaatgcggaatagaactgggtaaacaggcttaagcccgctgccgaatcatccgtcaccagcttccacggcatacagcatgccgagaggattcctaccaggatggtggcgtgggaccatttcatgtggaatgattccatcagcacataggatggcggaacgatattgttcagcacattggttgtgacctgggcaaatgcaataaacagcaatgtcactactgtgaggaacttgcttcccatggttgtggagaacaccacaaccgggtcgctgttgccggtagcagccgtcacaagcagtccgatcaatcccataaacagcgttacaggcagaatggcaaccgtgtaaatgcttccggtaaaggtgggtcccaccttcccctccaggttacgggaatagtcggatgcattgatgatcatggttgagtagattcccaggaaggaggtggtggctgcccagaaaggcatgccccatgttcccttgattccggagaacacgtcatcaatctcagttgcgaactgtgtcttgaccacatacagcatgtaggccagtattgcgatgatgaatacacaggaaatattttccagccacttgataccctcaaatcccttgatggccagggcaacctgcagcattgtaaacagggcatagaccaggggaaggttgctgaaaccgaacaggatgctcagacagctgttgatggctcccgctcccacccagctctggaaaccaaaccagataatggcaggaatacctcttaacaggccgggcaccttgacgccggtggtgccgaagctgcttcgaagctgtaccgtgtaaggaataccgtacttatgcccgcagttgccgatgattaccagcgccaccgcgatgaccagacatccgatgaccatggcaaggatggcctgccccactgtcaatgcccctatcaggccggcgcccatggagaaggtgccgatggatacgcaccctcccatgaagcttgccgcgtaggaaagaggccccataatacgttttttcgtcggctgcagatccggatccacgttctttaccagctccggattcaaattcatattttcaactatattactcatactttctccttttccggggagtgtctgaaaatcacgttctgtcagctcagtctcctgaccagggtccccacacctttttctgctgtaatccttccgtcttcagccaccacattgccgcggatgatggtgcatacaggcagtcctttgcccttcattcccacaaacgcggaaatcttgtttacatacaggagggattcgcttgtaatctcccactccttttccgggtccagaatcacaaggtccgcgtcaaatcccggaagtatgtcaccctttttcccgtatatgccgaatgcttttgccggattaagggccatggctcttgccaataccctgggatccacgccccgctttacgcatccctcgttaaacgccacctggaatccgctctggatgccgctgatgccgccccatacgtcaaatacattctcgattttatttcccagaatctctttgaatttctcatcgtaggagcagggagaatgatcgcttgctataccgctgaaggtaccgtcctccacataggtccagagacggtccacatcttccttggaccgcaggggaggcgcgcatttgaacagaggtccgttggcaaggacatcctggtccgtcaggctcagataatgggaacacgtctccgccgtcacatcatagcccgcctgctgggcctcctttatcttctgggccacgtcaggactgctcacgtggcagatatgtaccttgcaccctgttgccttggcaatctcaatcatatccacagtggcaaccatctccgcaatcaccggcctggaatccagaaatccctgccagtccatatgtccttctcttttcatcctggcttcctgccatttaatcatggaaaaatcttcgcagtggaagccggcacggccgccaaattccttaatcctctccatggcctcataggcctgcccgtagtttaaggagctgtaatcaggtgataccggtccgataaaggatttgaaggcaacacagcccttctcatgcaggccttccagttcgtcaaaattatccggcaccaggccgccccagaagcagtagtccgtatatgcgttacagtccaccttctccacttttctgtcaaaaattgccgcgtttgtcatggccggttcattttgaaggggcatgtcgatgatggtggtataacctcccatggctgccgccgctgtcccatgttcataatcctcccgccattcataccccggatcattgaggtgggcgtgggtgtcaatggctcctggaaatacatattttccttttgcatcaatcacctttgcagcctccggctcctgcccggcctccagcagggcggcaatcctgccgtcctttatgccgatattcccctctgtcactgcctgggcggtaacaatccttccatttttcactaacagatcatacataagctttgcctcctatttacttctccagggaagtccctttcctgaaacgttggcaggacggtatatgcttcatgcagaaataatataccagtcctgtaggtatggttgccgtaaagaaggatatgtctacattgacaagtccgattaccgcgcccactgccgttgcaatgatggctgcccagttgattcctgaatgggttccgttatcatcgtagaggtcatccagagccgctccttccatcttccccctgtgcaggatgtagtaatccgtaatcagcacggcaaagattgggccaaagaaagcggtgtaaatcttaacaaacagatccagtcctgccgcggagctgtcgttggtcaggatccacggacaggtacatacagccaggactcccaccaggatcacggccgtcctgtgcttcatcttaaatgcgtccataaacgcataggcagggggcaccacgttgctggccaggttggtggtcatctgggcaaaaaggatgaatccaagggttgccaccagcagaaccttgttgtgtaccatctgtgaaaatgcgttgatggggtttgcaatccctgttgccgtggaagccattgcgccgataagtcccagaaggacagtggttggtaccatggcgataaaataggcaacaccgcgctttcctacggaaaaaccgccctttaactctctggaatagtcgccggcattgagcataaccgtggtgctgttgccaaagaaagcgatgatggcagcgatgaacggcattccccaagaacccttcctgctgatgagcttatcgccaatcacgccccagtactgggtcacgcatacaaataacatatagagcatggcgctgacgattaccacgccgccgatgttctccacccatttgattccgtggaagccctttactgataatataatctggaccacctggaacaggaggaagaacagcacaacattgtcatatccgaatatggcaatggatatctggttgatggcggagccgcccagccaggtctggaatccgtaccatacaatagcgggaagcccacggatcataactggtacaatgtttccctttgtgccgtacgcgctcttaagctgaaccgcatagggcgcgcctgatttgtagctgaaacggtcatttgcacagatgccgataaccagtatggtggagccaatcagcaccgccaaaaatacctgcatcaggttaagccccttgtccaactgggcagaccccatggtcaatgtgccgatggaaatacatcctcccagccacagcatcaggtaggatccccaccccataatacggtccttgtcctgaatcggcgccaatgaatctgtttgcttatttacttcattttttacatcgctcataatatcaccccttattttcttctcctcgtattaacagtcatgtaccggagtcacgtattccccgtagcccagagcgtcttccctataggtttcgccggaagcaaccaccttgccccggatgatggtgcatacgggagcgccctttccttccagaccgtcgaagcaggatacatgccccttggtcagcagttcattctggctgcatttccaggccttctcaggatcaacaataacaatgtccccgtcaaatcccagctcaaaggcccccttccggccgtagaggccgaataccctggccggattgtagtccatcaccctggcaatcagggtggggcttaagcccttcttgtttaccaccatgtcaaacatcataggcaggaagaactggatggagttgagaccgccccatgcatgccagatatcctttgtggaattgtccttttcctcatccgcagccggtgagtggtcgcttcccacacaggataatgtgccgtccagaacataatcccacagccgttccatatcctctttcctgcgcataggcggcgtacacttggccggagcgcccttctcaaagacaaaatcctctgtaaacccaagatagtgtggacatgtctcagccgtaataggaagcccttcgtggatggcgtcctttacaacctgtgccaccatggggtggctcacatggcagatatgcactcttcccccggttgccctggccatgtcaatcacatttttagtggcaacatactcggtccacacatcatgggaatccaggaaatccctgattttctcttcgctggtccttccggtttttgcctttgcctccttttcccgttccagcacctgaccgaactcttcacagtggaaaccgcacagggccccgtacggctttaagatttccagagcctttctcacattgcccatgttcacggttgggaacaaatcgccgttggggcaggtaaaccctttgaatgcagccacgccgcatttgtgcaggtccaccagatccgccatgttgttcttcaccgaaccgggctgattgtcataatcccccacaataccgccccacagggcaaaatccacataggagtgcttgctgatgcgccccatcttcaggtcaaagatttccttattcatcaaagacggatcattgttcaagggcatgtcaatcaggcaggtacagccagctgccgctgccgccctggaaccggtctcaaagtcctccctgtattcaaatcccggttcattcaggtgcgcgtggcaatcaatgattcccggatatatgtagcatccctttgcatctatcacttcttttgcagccgcctgcgaccccttggcaagaaaggcagcgtagaccccgtcttttaccgcaatatcagcttcataaatcctgtcaggggttaccagctttccgtttgttattactaaatcatacattttttacctccttacagactgtaaatcgttgaccgtttcaatacttacgttgtattttattagatacacagtcagaaaacaatgacgagaaagcggggaaaaattatgtttttttgtctatcatgtataaaactttattatttcaaattttgtttttgtgtttttttcgataatctggtaaaatttattgttgaagcattgttataagtgcaacaaacagcatagcacagggagaaagcaaatgtatcctaccatcaccgccattgccgcctacgcagcacagcagctggatgagtgccgtctttggacggtccactctgtctacaaaaaaacagtgaattttcaggcaggagagcgccttctggccctgcaggccgcatcctctcccatgtctcctatcagtatcataacagacatggatgtcagggcttttgaagttctaccggttaaaccgggccaacaggtatccattgccggcagccgtattataatatcctctccggagcacacagtggcttttgggtgccggccgaaaaaagtctgctgcacccggttaacctgcccgcccgggccgtttccctgcaaagagcttctttcacagatccgtcaggccgtcgccagctcgcaggccggcatattccggcttctgttctgcgattccacggaaggacaggcgattacaggcaaagaagaatacagcctaattctagctgcagccggaagccgaatcctccaatgcagcgaatgtctggaacagcatttgtacggagatgctgccaaacacctggcagaactcattggactgggaataggccttacgcccagcggtgatgattttctgtgcggggtgctggcaggactcatcctgcgcggagaggaaaaccatccatttgcgcacgctctctgccgggagataacttcccgccgttttgataccaatgatatcagccgcgcctttttggactgctctgtgcagcaccatttcagcctggctgtcaacagcctgacagaccttccctctgccgataggattttaaacgtattctcagacattgggcattcttccggcattgatactttatgcggggttgcgtacggactctccgcagaggtataaggatggggttcagacacaacaaaagcgcaggcttctgtgcctccccggaggagtatcacagcacagtgcctgcgcttatatataatctattatattttaaagttattaccgccttgtaaggatagaatcaatcagcccatactccaatgcctcctccgcgctcatgaaattatcccgctctgtatccctggctatttcctcctcggagcggcctgtattcaccgccagaacacggtttaaacgctgcctgcttttctgcatgtaatccgacatgattttaatgtcgctggcagggccctggattccatttccgtgcatggctggctggtgtatcatgatttcggaatttggaagggccatgcgttttccatgtgctcctcctgccagcaaaaaggccccgaaactggctgccagtccaaggcagatagttgaaacgtcgcatttaatatactgcatggtatcatatacagcccagccagctgtcacagaaccacccggactgttgatgtacagctggatatccttgtccggatccgcggattccagaaacagcagctgggctataataaggctggcggaggtgtcgctgacctcctcgcccagaaagataatacggtccgacagaagcctggaatatatatcatagcttctctctcctcttcctgtctgttcaatcacataaggtatggtgctcacgctgcaatccctcccattctgtcacaaaccccatatactgtaaaacaggaggcttgatgcatttgaatccgtttctttgcaggctgataaatccccctttttctgtacgctccgggcggacataaatatacctgtttaaatgcgagagaaaatgcctgctgggactggtacccggcatcgtaggctatctgcgtgatgtccatatccgtatccaccagcttctccgccgccatggtaagcctgcgctcctgcacatatttatgaatcgtgcctcccgtctcttccatgaatatccggttcagatggaacctggaataacctgcatgctccgctatctgctccagattcagctcctcctccaggtgttcctcaatataatcaatgacctttctcactgtatgcttttgattcttcattctgccacctcctggtctggttcattttattataacaggagggagccggattgtcttaataaaaagtgcgttttgtaacgcaataagccggggcaggattttcgcaaatcccgccccggccattacccgaacacttaatatggactttaatacagcttcgcacccgccggaatatggtcatctacaatcaggagatgaagtccttcatgtccgtcctcctcatgaaccgcagagatcagcattccgcaggaatcaatgcccatcatctttctgggcggcagattcacaatcgcaatcgctgtctttccaatcaggtcttccggctcataatactcatgaattccgcttaaaatcgtgcggtctgtgcctgaaccatcatctaaggtaaactgtaaaagtttcttactcttgggcactggggcacagtcttttatctttacggcacggtaatcagactttgcaaaggtttcaaaatccaccatttcctcaaacagcggctcaatttttacgttggaaaaatcaattctttctgccggttttgcttctgttttcacttctgccgaagctgccttttccacctttttcgctccatcggaaccgcccagtgtcttcatggtggggaacagcagcacatccctgatggccggtgaatccgtcagcagcatgaccatacggtcaataccgaatccgattcctcctgtcggaggcatgcccacctccagcgcgtttaagaagtcctcgtccgtgtggttggcctcctcatcgccctgggccagaagctcttcctgtgccctaaaccgctccctctggtcaatgggatcattgatctcagagtaggcgttggccatctcccagccgttcataaagaactcaaagcgctccacataatcgggattgcccggctttttcttggtcagaggtgaaatctccaccggatggtccagaacaaaggtaggctgaaccaggtgctcctctgcaaactcctcaaagaacagattcaggatgtcgcccttcttatggcgcccctcaaactccactcccttttccttggcaacggctcttgcctcctccagggtatgaatctggtcaaaatcaactccggcatacttctttaccgcgtccaccatggtgatgcgggcaaaaggcttgcctaaatccatctccacgcctttataagtaatggtggtggtaccaagcacctcctgagccacaaaacggtacagcttctcggtcaggtccatcatcccgttgtaatccgtataagcctgatacagctccatcagggtgaactccgggttgtgcctggtatccagaccctcgttgcggaatacacgcccaatttcataaaccctctcaagtccgcctacaataagcctcttcagataaagctccagagatatacgaagctttagatcctcatccagggcattaaaatgggtctcaaaaggccttgcggcagcgccgcctgcattggaaaccagcataggggtctccacttccataaagccctctccgcccagatatttgcggatggcagccagtatcctggaacgcttgatgaaggtatccttcacctctgcgttcatgatcaggtccacgtagcgctggcggtaacgcatatccgtatctgtcaggccatggaacttctcaggaagcacctgaaggctcttggaaagaagggtcacctctgtggcatgaatggatatctcgcctgtcttggtggtaaaggcagttcccttcacacccacgatatcgccgatgtccattttcttgaaatccttataagactcctcacccacgctgtcccttgccacatagacctggatgctgccttttaaatcctgtacattacagaaagaagccttgcccatgacacgtttgaacatcatacggccagcaatggctgcttccttcccctcccactgctcatagttatccttgatatccatgctgtgggcagtcacatcatattttgtaatctggaaagggtcctttccagctgtctgaagctccgccagcttatccctgcgcgccttcagcacatgatttaaatctgtatctgcctgattaaccttctgctgttctcccacgtccttaactcctttgtgtcagatttatgaaaccctctggatttccagcaccttatactggatatcccctgcctgggtctccacgtctacgcagtcacccactaccttgcctatcagggcgcggcctaccggtgattcgttgcttatcttattctgcaggctgttggcctcggtggaaccaacgatatagaactccatctcttcgtcatactccacatccagaagctttaccttacatccgatattaattttatccaggtcgatttcatcctctaccacgacctcggcgttcttaagaagcttctccagttcctcgatacgcagctcaatgtccctctgctcatccttggctgcatcatactctgcattctcggacaaatcgccctgctctcttgcttccttaatcttctgcgcaacttcttttctcttgacaactttcagattctgcagttcatcctcgtactgtttgagtccggcatatgtcaaaatgtgtttcttatctgccatcttacccgcttccttcctttaattcttactttatgttgatttcacttgagtatcattcttaatgtccacacattctgagtattatataggaaaatgtgtccattgtcaagattggattttcctgtccagaagctccacgaaaccctccaatgtctccacctggttgatttcattcctcagtgtggctgagtggggcattccttttgtataccaggccatatggcccctcatttcccgcatggcaaccccttctcccttgaactgtaccagcatccggccgtgccgcagaatcatggcctttatctcagccatggaaggccccggaagaacctcccctgtatccagatagtggttaatccggccgaacagccacggattccccttggctcccctggccaccataatgccgtcgcatcctgtctccttaagcatcctgccggcgtcctccggcgtaaagatatccccgtttccgatgacagggatccgtactgcctccttcacctgacggatgatgtcccagtccgcctttcctgaataatactgctccctggtgcgcccatggacagccacagcggcaacgccgcagctttccgccatcttagcaaattccacggcattgacagagaggtcgttgaaccccttgcggaatttcacagtcacgggctttttcaccgctttcaccatggccgtcagcacttcctttgcccgttccggattcttcatcagcgcggatccctcgccgttgttgacgattttcggcacagggcatcccatgttcacgtcaatgtaatcatagggtccttcctccagcctggccgcaatctccgccataatgtccggctccgagccaaagagctgcacggctgcggggcactcggccgggtctatctgcagcagttctctggtgtttttgttgttgtacagaaccgcctttgcgctgaccatctccgtcaccacgcagccagctccctgttcccggcacagcacccgaaagggcagatccgtgacgccagccatgggcgccagtattacattattctcaagaactgtgtttccaatcctaagtttcatttaatcttccccgtcatcctctatatctatgtcctcacccaggaaaaatgtcctgtaatacagttccagcgcttccagcatttcttttttctcttcctggtactgcttgattttaaggacgcttcctatctcgtcaaagagataatccgtttcctccgaggtcaccctgaattccaggtttcccctttcgtcaaattccatggtaagcacgccgcccacatcctctgtatacatcacacacatgatctggagctcgtctcttatggactggggcagggatttgaaatcctggttaaaataatatttttgttcataggaattggctccgcaaagcactgttgtatccttcatctcatctctccacaaaagtccgctgcctgtgacaggcggcggactttccattctatcgtcgtttatgttctcacgtaccggactagcgaatcagcatcttggcaatctcatactgctcttccgggatgtcctttgtcatattcagggcttcctggatatcgaaatccacaaactcaccgtgcttataggctaccaggcggttgctcttgcctgcggccagaagctctgctgccttggctcccatgatggaggcatataccctgtccttacaggtaggcgttccgccgcgctgcatgtggcccaggatggtggcccttgtctcgatgcccgtggcagcctcaatgcgctttgccatggaaccggaatgaccgattccctctgcattgataatgatgttgtgtttcttgccccgcctgcggttgtcgataatccggttaatcagggcctgctcgttgccgtcatagcgctccggaagaagaatatcctccgcgccgtttccaatgccgcaccacagcgcgatgtatccggcgttgcgccccataacctccacaatgctgcaccgctcatgggatgtggatgtatcacgaatcttatcaattgcttccatggccgtgttgacagccgtgtcaaaaccaatggtataatcggtacaggcaatatccaggtcaatggttcccggaaggccgattgtattgatacccagggaggacagctttcccgcacctctgaaggaaccgtctcctccgatgaccaccattccgtcaatgccatgcttgcggcagatatcagcgcccttctgctggccttccgctgtggtgaactccttacatcttgccgtgtaaaggatggtgccgccccggttgatgatgtcagacacgctggtggactccatgtccacgatttcctcctccagcaggcctgcgtatccgcgcatgatgccctttaccttaaggcccttattgatagcagtccttacaaccgcgcggatggccgcgttcattcccggcgcgtcgcctccgctggtaagtactccaatggttttcactgcctttgccatagcaatttacctccttgtattaagcacatacatttcttctgtgctgacatcgctctcaatcattcattctctcatctatatccaacgctattctaattcattttccccagcttttcaagacctttttctacgactttgacatttttttcaccaagtcccctccccagctcttccaaaagcccgggcgtaacctgtacattccagttggccggaaggactttcttggccctctccttctggagataaatgaccacccggtcctttccctcgctggaccgcagagaggtgagcagacgctgctccccggactgatacgtctccatatccgggaactggagccacagctccttgggtatactgtcaaagggaatcacctgctcgcacaccagctttcccaccggatcgtctccgatggacacccgtcccctgatgaacagcttggagtcctcggtaaaaaggtcccggttggcctcgtaatcccttgggaacacgatgacctccaccggtcccagaaggtcctccagggttatgaaagccataagctggttggtcctggtggtctttacggtcttgcctgccaccagtccgccgatgacagccctggatccgtccgccacccctgccgcatccgtctcctcatccacgataaactgggctgaggtggctgttatgttccttctccacgtctcctcatagtcgtccaggggatggccgctgatatagactcccagtatttccttctcaaaggcaagaagctcatcctttgagtattcccccacatccggaaatgtaatctggaattcgtttctgtcttcctcatccgcaatgtcgaaaaggcttaactgcccctcaaacatggattttttctccctggccttttcctccagcatggtgggcgccaccgccatcttctggcgcctggttccgggcagggtatccagagcgcctgacttgatgaaattttccagggttcgcttgtttacttccttcatgctcatgcgtcccacaaaatcctccatggaacggaagggaccgtttctctccctctccgccaggattacctctgtcacgggtttgcccacgctcttgatggcggacaggccgtaacggatagcgtcccctgacacggagaagccgctctcgccctcgttgatatccggcggcagcacgggaatacccatcatgcggcggcaggtcagcacatactcggaaaatttacttacattgtccatgactgatgtcatgagggcggccataaactccctgggataatagtatttcagatacgctgtctggtaggacaccaccgcgtaagccgctgcgtgggacttgttgaaggcatatttagcaaaatcaatcatctcatcgtagatatggtttgcggtcttctcgtcaatcccattgttcacacagcccttaaccccttccgactggctgccgtagacaaagttctggcgctccttttccatgaccgacgtctttttcttactcatggcgcggcgcaccagatcgctgcgtcccatggtgtatccggccaaatcacgcacaatctgcataacctgctcctggtacacgatacatccataggtggggcttaatatgggctccagctgggggcagtcataggtgatggaagccctgtcgttcttgcccttcagatatttgggtataaaatccatggggcccggacggtacagggagatgcctgctatgatatcctccaggttctccgccttaagctccttcatgaagctcttcatccccgcgctttccagctggaacacgccctcggtcctgcctgttccgatggattcaagcaccttcttatcgtcaaaatcaatgtggtcaatgtcaatggttatgccgtaatccttctcagccagccgcaccgcgttctggatcaccgtcagggtccgcagccccagaaagtccattttgagaagtcccagctcctcgatggttgtcatggtaaactgggtggtgatggtgccgtcagaggccctggacagagggacaaactcgtctatggaccggctgccaatcactacccctgctgcatgcatggaggtatgcctgggcagtccctccagacgcctggacatgtcgatgagataatggacctgctcatcttcattgtaggcctttttaagatccggattcatggtcagggccttatccagcgtcatccccagatcccctggaatcatcttggcaatggtgtcgcacagggagtatggcaaatccagcacacgccccacatcccggacaacacccttggcagccagggtaccaaaggtgacaatctgcaccacctggtccttgccgtacttgcgcaccacgtagtcaattacctcctggcgccgctcataacaaaagtcaatatcaatatcgggcattgacacgcgctccgggttcaggaaacgctcaaagagaagattatagcgcaccggatcaatgttggtgattcccagtgtgtagctcacaatgctcccggcagcagacccccgcccaggccccacgatgatatcctgggatcgggcatagttgataaaatcccacacgatcaggaaataatccacgtatcccatggagcggataacatccagctcatagtccagccggctgctcagtgtgccgtcatcgtccggatagcgggtcttaaagccctcccggcacagatggtttaagtagctccaggagtcaaaaccctcaggcacctcatacttaggaagcttggtaaccccgaactcaatctccacattgcagcgctccgctatcatatgggtgttttcaatggcctcaggcgcataggggaacagagcccgcatttcctcctcggacttacagtagtactgtcctccctcgtagcgcatcctgtcctcatccgccaccttcttgccggtctggatgcacagaaggatatcatgggccttctcatcctcggcaaaggtatagtggatatcgttggtggccaccagcttaaggcccgtgtccctgctcatgcgcataaggccctggtttaccagcttttggtccggcaggccgtggtcctggagctccaggaagaagttgtcctttccgaaaatatccacatacttttcagatgccctgactgcctcctcatacattcccctggtcaggcagcgctgcacctcccctgccagacaggcgctgagggcaatgactccctcatggtaggtccgcagcacctcatagtccaccctgggtttatagtaaaatccgtccacaaaccccttggacacaattttcatcaggttttcataacctttgttgttctctgccagcagcaccaggtggtaataacggtcctcaccgcttaccgtctccctgtcaaagcgggagcccggagccacatagacctcgcatcccagtatgggcttgatgccggcctccctggcagctttataaaaatcaatgactccatacatcacgccatggtccgtgacagccatgctgtccatgccaagctcctttgccctggctgtcagctccctgattttacaggagccgtccaaaaggctgtattccgtatggacgtgcaaatgggtaaatgccattccctattctctccttatccttgcggtatcattcgagtaacagtttatcataaatacagataaaagaaaagagaaccaggcaagtcctgcctgattcccattatctatctctccaaacaaacggactggtagttactggtttttcagatacttctcaatttcagttacagctgcctcctcatcttttccgtcggcttccaccaaaatggattcacctgcggtcagacagagagtcatcattcccatgatgctcttggcattcacacgctttgcctctgcttccaggtaaatcgcgctttcgtactgactggctacctgcacaagcatagctgccggtctcgcctcaagtcctgatgccaattcaactgtaatcaatttctttaccataataatcctcctcattcctttgaatggttcacagcccctgatacgttccaatggtcatgttccaatctggccgcatcccgactgccattcaggtgcccgtactgattcgtacttgataaaactattgcaaacttgatgtattacggtctggaaactgctgccgcagctcttcagccacaaggcttaatttcctcaaacggtggttcacgcctgatttacccacaggcggttccagggcctcccccaattccttcaaggtcgcctccggccgttccagccgtatgcgggccatctcctgaagactctcaggcagacccgaaagaccggcaacagactgaatgaaacggatgtcttctatctgtttcaccgcagctgacacagtcttattgatattggcagtctcgcagttgacctgacggtttacgctgcccctcatctccttgacaatgcggatattctccagctccataagggataccggggcctccatcacattaaggatgtccacaatctggctgccctccttgatatagaccacatagtacttcttcctgggcactattttggcctcgatatcaaaggtggcaatgatgttcttaagctgctccgcctttggctcggtgggacacacgatttcaaagtggtagaacttctccggggcgctgatggaaccggccgccaggaaggcgccacgtatgaaagcccgtctgcagcaggcattctgaagcaccacattccggatcagggaaagattttcaccaatttccccctgggaattgatgagcttcactgcctgcaggaccttgagggcttcctcatgttccctgactgctacgatgtatgtcctgctccgtccgggatttattccactgcgaatcgagacatcagttcttatattaaatgtttttttcaataatgtaaagtactttcttgcaactgccacattttccgtatggatttcaatccaaaaatggtctgaggctgatatctttacccttccgcacaggctcaggattgctgctgtctctgctatctggcagtggcgcgccccaggcatctgcctggacagctcgtcttttacgctggaagaaaatgacatgtccgctacttccttttattgtctttgtcgatgtccctgtgttctattttaatgccgtattcggccctggcagtcaggtgggcgcaaagggccctggcaaccgtcacggagcggtgcttgcctccggtacagccaactgccaccaccagctggttctttccttcattgatataattaggcaggaggaaatccatcatgtcatagagcttgtccagaaactgggcgcaagtgcctccctgcatcacataatcccggacagactggtcctcccctgtcagcaggcgcaggtcctccgaatagtagggattgggcagaaaacgcacgtcgaacaccaggtccgcatcctccggaatgccgtacttaaagccaaaggaaagaaccgtgacaaacatgttgcagtactcctggtgtttgaggaatatcttttccagctcctgccgcagctctctggtaaggagcttgctggtgtcaatgatgaagtccgcgtcctttttgagaaaagccagcttgaccctctccttttcaattcccttgtccagcctgcctgtcccggccaggggatggctgcggcgtgtttccttataccgcttaatcagaaccccgtcattggcatccaggaacagaatctggtaatccatccccagttccttccatccccttaaaacagcatccagctggctcagttcctcaccgctgcggatgtctatgcccagggcggcctggctgatgtcgctgccggccgctgccagctgggcaaatttatccaccagagatatgggcaggttatccacacagtaaaagcccaaatcctccagcattttcagtgcaattgtcttgcctgccccggacattccggttacaattacaagcttcatccatccacctcagttacgtaaaattagcattccaaatcagaattccccccagcgcttcacttccatctcaagcttcacaccggattgttccatcaccgtctttctgatatgaccgcacagggccattacatcggacgcagtagcgtttccgccgttgatcacaaaaccgcagtgcttctccgataccctggcaccgcccatgccgtatcccctgaggccggcatcctcaatgagcttgcccgcaaagtatccctggggacgtttgaaggtactgcctgcgctgggatattccaggggctgtttctccctccgtctggctgccagttccttcatccgggcctcaatggcttcctggtcccccggttccagctgaaaggatgcctccagcaccgtatagcccctgtgtgggatacagctggtgcggtatcccagctccagctcatccacggaaagctccagcacctctccttcatttgtcatgaccctggctgatttgaggatattctttatctcagagccataggcccccgcgttcatcaccagggcaccgcctacgctgccgggtatgcctgcggcaaattccataccggtcaggcagtggtccagggccacacgggccacacggcccagcagttcacctgcccccgcacgtataacgcttccctctgccccggcataacaccagtttccttccatggcaatgaccacgcccttgattcccctgtcgctgaccaggagattgctgccattccccagtacgttccagggaatgtcatgttccctgcacatgcagatgacctttcccagctcatcttcattgccggggcatacataggcttcagccggccccccgatgcggaaggtggtgtggctgctcatgggttccatgaatcggcacactgcgccttctgatacaagcacctctttcaacatatgttccagattcaaaatacattcctcgcttacgactaattttcctggccctttcccaaattggcctgtacccggttgtacagctcctgggctgcattgtagcccatcttcttctggcggtagttgacggccgcggactccacgataatagccaggttgcgtcccggacggatgggaatggtatggcagaccacctggttgcctaaaaactcggtgtactggtcttccaggcccagcctgtcgtattccttatccttgctccagtcctccagcttgatgaccatgtcgatggactgggtatccttaacgctctccacaccgaacagggtctttacatcaatgatgccgatgccccgcagttcgataaaatgcttggtgatgtcaggggcgcttcctatcagggtatcatcgctgactctgcgtatctccaccacgtcatccgtcaccagacggtgtcccctcttaatcagttccagggcagcctcgctcttgccgatgccgctttctcccataatcagcacaccttcaccgaatacatcaatcagcacgccgtggatactgatgcagggagccagctttacgttgagccagcggatgatttctgccatcagggcagaggtggtcttatcagacacaaggcagggaacgccatagtaattacagaattccaaaaggtcctcatccggctcctggtcgcggctgaacaccagacatggaatctggctggatgtgagcttatcgtacatccggcgcttctgctcctggtccatggtattaatatatgcctgctccacgtatccgatgatttgaacccgctccctgtcaaaatgatcaaagaatcccgtgagctgcagtgccggacggttcacatccggatgcgtcagcacaatcttgtccgtgtcaatctccggcgtggtgtttttaagcttcatcttcttgattaattccgatatggttactccatgcatgataatacccccttgacctggtttcgcttctcgtttaacttctatcatactatcataatttagttcggttgtcatgtatttttatcattgtgtttccataatttgggagtccgtttttgccccgtcatccgtgcctgcgctggtgccgggcttttcattggtctgtaaaacggcctggccaccggtcctgtcactttccttatccccatggaaaaagcggtatacggattcggccgacctgcggttcatttgcggcgtctgttccagttcttccacggaagcgcttctcaccgcctctatatccttaaaatggcgcataagggcctttctcctggccggcccaatccctggaatgtcgtccagtatggattttacctgcccctttcccctgaggctcctgtggtattcaatggcaaaacggtgggcttcatcctgaatcctggtgataagcctgaacccttcggagtgacggtcgatgggaatctccacattattatagtagagtcccctggttctgtggttatcatccttcaccataccgcagaccggtatggaaagccccagcttatcaaggacctccagggcaatgtttacctgtcctctgccgccgtccatcatgatcaggtccggaaacctggtaaaacttcccatgcttaaatcagcgcccttttccttcagctcctctgtctccctcataccgtgggaaaacctgcgcgtcagcacctcttccatagacgcatagtcattgggaccctggactgtcttgatgcggaattttctgtaatcgctgcgctttggcctgccgtcctcgtaaaccaccatagaacccacggactccacaccgcttgtattggagatatcgtatgcctccatgcgccggatgcccccgattccaataagctctccaatctggttgatggccccgatggtgcgaagctcctctttcttaatccgttccttatcctgggacagcaccagggctgcattcctggctgccagctccaccaggcgttccttctctccctttttcggaaccaccagccttaccttctgtccccgtttggcggacagccactggctgatgacctcctcatcccccaaaggatgctggagccacagttcccttggaataaatggtgtgcctgcatagaactgctttacaaagctgtccagaatctcgccctcattttccgccgtggcagccgatatatgaaaatggtccctgccaatcagcttgccctcccggatgaagaacacctgtaccaccgcgtctctctcatccctggccatggccacgatgtcccggtcttccatgccgctgctggtaatcttctgcttctgcgccacctgcttcacgctgtttagcagctcccggtactcaatagcccgctcaaactccagattgtccgaagcaatctgcattttttcctggaggttctttatgagagggtcgaatctgccgttcaaaaagtccagggcctggttaaagttggactggtattcctccctggaaatataaccctggcacggggcgtcacactgcttgatgtggtaattgagacacggccgctcctttcccgtatcctttggcagattccggttgcaggtcctgatccggtacaatttgtgtatcaaatccagggtgtcctttacagccccggcgctggtataaggaccaaagtaacggcttctgccgtcctttttcatgtccctggcaaacagaaggcggggaaaatcctcccccatggttgccttgatataaggatagcttttgtcatcctttaacatggtgttgtaccgcggcctgtgctccttaatcaggttgcactccagcaccagggcttccagctcggaatctgtcaggatatattcaaaccatgcaatatgggacaccatctgttcaattttggccgtcttattcctgctgctctggaaatactgcctgacccggttcttaaggctgatggccttgcccacatatataatctcatccctgtcattgtgcataagataaactcccggactggccgggagtttcttcagttcttcctctaaatcaaacaatacctgtcaccatccttttcatatggccctatattcagatgctttttcgttttccggcatgccgttttaccgggctgcgcctgccggcgggacagtctctggaggaacgttctctggcgggacagtctctgccggaacgttctctgcagcgtccctctctgtctccagcgccgccctggactgggatatacgctggtcctcttcctctgcttcctccggagtaagcagcccgccgtagtgataactgacccctgcatcccagagaatccactggtcatagcctgcatcgtagacagcctgtatctgctgcctcacctgttcatcgccatatttaatataatgttccagataggacgcagtaaagtcctgaagccacggccttaccacggcctgcggcgcatcctcctttgcggatgcggccagaagctccctggaaccattcaatgcatttaatattgtatcatacggctgggtatccggatactctattccaaaatttcccggcccgtagtgggatggataaatcatggggcatatataatccagctgctccgccatgtcctcatattcctggcccacggcagccgcatcctcctcgctgcgcataatggtgccgaatacatcggccgacacaaagagtccttcctttgccagctcatcatgggcatagcctatgaattctgtaatagcctgggtcttattgcgtccctgggtatccgcgtcgtcaaaaacaacatcattcatggtcttgtccacggcaaaccggatatagtcgaactgaatctcatcaaatcccgcttcgcctgcctttttccccacctcaatcagataatcccagacttccttcttataaggatttacccatgcaaggcctttattatcccggtaaatcttgccgtcagccacatgcaggctccactcgggcttctgttctgcaagataggggtccctgaacgccaccaccctggctatggtatagattccatgctccttaagctttgccataagcgcaggcatgtcctggataaaaacctggcaggcccctatctcatttaccgtaggggaatccatggcataggtgatccttccctggtcatccttcacatcaatgaccactgcattgagctccgtcctgtcgacctcctcaatgatcttatccatcatatcaccggtaccggctacataggcggatacatagatgccctttacctttaccgggtttctgggcggatatgtggaaatggtaatgacctgggaatcagccgcctctgcctcctgggtctcctgcccgttctgggcccctgatgcctcagactgcacagactcctcctgggctctggtcatctcctttgccggttcataccgggaacatcctgtcattgcaaggattaatatgcctgctgctatccaccttttcatacgtaacctctgtctttcccaattatcttatgattcctggaaattcccatttccattcttaatctatatcaaaaaggcaaatgcctgtaagttcagtgaatcagacctaaacatccgttcgttcccactataataccatattctccctgttttgtatataaaatatgacttttttgttacaaattcattaatttctcccactttttgtaaatactcacatctccccaacatcaaaaagcgcccgaacaggggctgtatgcctttgtccgggcgtgtgccgggccggccaggggccggaccgtgtttcttatagattcttatattctctcgtattttcttgatttaaatgtgtctaagcctctgccagatgtttctgaagggcagcccttacagcacccttgcctgcaatcagctcagagaaaatgctctccacatattcgcctagccctgcctcatacaggtccactccgaatatcttggcatcgcttaaaacaggctgaagcacttcgtgtacattgcacggctctcctacctttacgccctgcagcttctcagccagtccctcatacatggggtccgggcttacggcaaaggtattgccctcatcatctacccccagcaggtaacggcaccatcctgcctgaaccatgggtatgaacttaagggacttcacatccagctcaggccttgccatgtattccttaatggtctcaccgaaacggatggacagcttctgggatgtgtcgcaggcaattctctgtggcgtatcaggcataaaaggattgggcacgcggatctgcaatacctcgtcaataaacttcttaggagaaagaatgccgggatccgtaaccacaggaagaccttctttgtaaccgatgatttccaccagcttcaccaggtctgcgtccttcatctcctcgctgatcttggtgtagcccaggagacagccatatacagccagggtggtgtgaaggggattcaggcaggtgcacaccttcatgcgctccaccttttctacggtatccctggtagtaaacatgacgcctgcatgctccagcctggggcgtccgttggggaacgcatcctcaatcaccaggtattcagcttcctctgcattgacaaaaggagccacatatgtgttcttgctggtgacaatgctctctgtatctgtaaagcctgcctcctccagcatcttcttgacgctgtcatccggacgtggggtgattttgtcaatcatgctccacgggaaggaaacatgcgccggattctcaatatactccaggaatccgctgtcagcctttccgttctctgtccatgcctttgcataagcgtccacagccgcatacagcttatcgccgttgtgggaacagttatccatgctgaccagggccaacggagctgcgccatgggtatatctccagtaacacagggcggagagcttaccgatataactgtctgcctgttccggaccagcctcaaaatcagcctttacgtccgggcggaaggacccgtctgccgaagtgatgctgtagcccttttctgtgatggtgaagctgaccatctgcagggttttactggcaaaaatatcctttaaacagttccagtcctccgcatcctggcgatccacagtcagggactgggcaaggcttccaatcacagttttctcaatggttccattggctttcagtgtgaccaggaggcttaagtcatcctgaggcctgtatgcctttttgatgatttcatagtcataaccttctgccacgatgattccggtcttttcaacaccatcgttcagcagcttctgctgacacgctgcaggaaatgcgcggaagatattgcctgcaccgaaatgcacccactgcggacactctctggtagctgccttcatcgcttctctgtcaaattttggaagttctatttctgctgcttcccactcttccttattcctcagttcactgtctaataaatgcataaccattccctcctgtgtttgttgatttcatgatttaatattaccaccctgagggtgaataatccatatccctttttgttcaatacattgcaaaacttgctgtcagcaaccccgtgatttgtcaaaaacaatgagacctggttttaccgcatcaaaaaagaccagcatctgcgccggtctctcctcataactgctgaacctcaaaaaatactgcatcgtcactgaatcaccgctgatactgaatcaccgctgatacattggaattctctgtctggtcaaacaaatcatccccgttagccgccattgcatttaccaaaatcagcatcgccgcaagcatggcccacgcaaagccgcccagtaccttcctgactttcattctactctgcctcctggattcataagcctgataactgaaaattacatgcttaatttcactctgttatcccattatacaaacttttatgaaaaaagcaagtccttttcctcttacactgtcttacattttccttaaaagccctatatttcaatggattttactgaattagaatttttttccataaggggaaaacaacctgattccagcgttctttagatagattctaaggaaaatgaagggcaatgggcaatggattttgtccgcctgacatatgtccatcccctctccccttacggctaaaatggaatttttcaccttttttgtaggcaaattctgcatatccgggatatgagccatttttttaggtaaactgaaattaccttatttttctatctatataatatacacgtaagaaaagaggatacaccgtgattacatatgaacctttttggaacacgctcaagaattctgatgaatccacctataccttaatctataatcataacctgtcaagctccaccatagacagactccggaaaaacaagccgttaagcaccacaacgctcaatgacctctgccgcattctggactgcgacatcaatgacatcatatcctaccaacgttctgaaagtgaccagtttctttagaagggacacatactttccttcctccttacccggtttttggagatgatttgctccaggcctaattgccttggaccgctgcgctgcgaacagcaatggctgaagccatttctatcacagcatccatactgtccctggcatcatcctcccaaagttcatagaacacaccctcatgctcccaggaaaccagtataccgtggatatcggaattttccactgttttttggattgtcattttcaccagtttctctcctgcccaaacctcctgctgcagagtcccctcctcgtcaaggacgtagtattccgaggggccgcctcctgcctccagggaagcccaggccatggcatcagactgtgtgttttcatcatgaaactgaatctgtacggtatgctcatccttctgaattataacagggctgctgcataccgttacgtcatccggcagcttcagacgcagaacaggggcttttgcagcttcctgctccgggatatgctccgtggtatgctccgatgcagtcccttcctctgtttcaagctctgtctcatgccttgtttcatgccctgtttcatgccctgtttcatgcccgttctcataccctgtttcagactctgttccggactctgtgaccccgctcaccgcggtctgctgtcctgctgacacagatgtcgccgtctccttctgcgcacctgtgccgggcgagcacgcgccaaggccaaggcctgccgcagccgcggctgcggcaaaatataaaatgtatttcttttttctcatattgcagctccttttaacctgtttgtactttcggctcatttatgaacttaacgcctttgtacctttaaaagccatgaatctgttcgttctgtgtatctacagaataccatatttttatattacatgcctcatttttttattcgtaaattactccttccgcccaaagaagtccttatcaaaaaaagcctgcccgcaggcaccccgggcagacttaaaaattcatttaacaaactctttcttattcatatataaaaccgctgagttcatagacacttacagttccgcagcacttcccttttatccgcataccaggacggtcaccgtacacccttgtggtaaagacctccagtccatcatttacaaatatttccagcgaagtggtgtctgaaaatatgcgcaggtccgtaagctgttccagtaaaacactgcgtcttgtcctgccgcttccgctgtttcccatgtccagggtcagcaggccattttgataggacaatgtgacatcatccctgatggtcaggcacatatcactgcaggactccatggataaacacgcctcgaacacaagtcctgtttccacacccttcccaagctcccaaaaatcataatctcttctgtcccggcgaagctccttcatttcctccagaggctgctgtaaaagacgtccttccctcatatgaaggaggcgcggcatggtaagggcatgctgccatccggcttttaccgtcggattggtatattctgcgtccggtattcccatccagcctatgagaatgtgccgcccctgctcgtccagaaaggtctgaggcgcataaaaatcaaagccccggtccaccattacgggaaactgcgaattcagcctgatggtattttccctgaaatcatagtccagacaaaagaccgtgcactgatgcacattctgatactctgttcccatgggcttcaccccctgggggcagcagaccaggcagagctggccgtccagacagaacaaatcagggcattcccacatatagccaaatgtttgttccgtcgtaattctattaaaatactcccaatttgttaaatccattgaccggtacacaaggaccattcccttgctcagggcatccctggcccccagtaccatatagtaatactccccttttttaaagaccttggggtcccttatgtgacagctcatgccagccggataatccttgtggttcatgaccagttccttggcagaaaaatgatatccgtccctgcttgtaacatgaatggtattgctcacccggccgctcataatataatcgtaatcatccctgtcaaacagctttacattgcctgtgtaaaaataatggatggtcttatcctccacataagcagaaccggaatatacgccatgggcatccaggtcctggtccggaaaaagcgccggctcctcctgtttatagtgaatgaaatcccgtgtggtatagtgaccccagagcttaatctcccctgtgggctcaaagggtgtatactgataataaatatggtacagtccctgaaactggcagagcccattggggtcgttcagccagccggtttccggcatcaggtggtaggccaggcggctttcatccgccctgaccctttccctgtaatcccggttgtcccggtaccatgcttcatagtcctccctgaggaccttctcatatttcttcaagctgcttcctcctcaccactgctttcttcaggcggcattcttctcaccactgctttcttcaggcggctttcttctcaccactgctttcttcaggcggctttctccctacctgcgcagcatgtttatgccgtcttaactgtcttaaccgctttcaccgccaggtccccgctgtccgcctgtccgccaggatatacagtcacatccagatttccgccctcaggcagaatcatcatagtctgcggattcattcccttttcccgaatcaaatccaggtcagcggcaataagcttatggcccttctttaccttatccccctgtgccacaaaggcctcaaatccctgcccatccagctgtactgtattgattccgatatgaatgagcacttccacgcctgtctcagatgtaattcccaccgcatgctttgtcggaaacagcaggcttatggtgccgtcgcacggcgcacataccatgccctcagccggattgatggccacgccgtcccccagggccttggatgcaaaaacctcatctgcggactgtcccacatccaggacctgccctttcatggggacataaagttcagtgatgatttcccggggctgctctattacctgtggcatttcgattttttgggatatttccacgtccgaggctgtttccgttccctcagccctgcctgcatcctttttctccgggccgtcctccctgccaagagcaaactttttccagaacaccatggtaagggcaaaggaaacgcccatggacaaaatgattccaatggcaaaattcatatagtggtcaggcttcatggagataaagcccggaagtcctgccgcgcccaatgcctgagccagtgtcttggtggctgccagataagcgcttcctgccgccgatccggccatggctgcatagaatggatacttcagtttcaatgtcacaccaaacatggctggttccgtaatgcctaacagggcagaaataccggatgcagagcagatggacttcatcttgtcattctttgtcataagaagcactgccaggaccgcggcgccctgggccacattgttcatgctggctgttgagaaaatgaagcttccgcctgtatgggcgctgtcggccagcagttgtgtctcaatggcaataaagctgtggtgcatgccggtcatggtaataggagcatatgcaaatccaaagagtgctccgcccacaggtcccagagtattatagagccatgtgatgcctgaggccagcagattgccggcttccctcagcacaggtcccacgcagataaaggtcaggaaagaagttaccaggatggataaaagtggggttgtcagattatccagccaggacggcgtaaccttgtgaagccgtttctcgatattggccagaatccaggagacagccagaacaggaagaacagttccctggtatccgatggcagctatctgaaaaccaaagatgtcccatacaggaggctgggccagaccaatctggtatgcgttcagcaaatccggatggaccataatcatgcccatggccgcccctaaaaacgcatttcctccaaactttctggttgcgctgaatccaatcagtaccggcagaaaggtaaagggtgcgtttgcaaaggtgttgatggccgaagccagtccctgccacatggggtacagctcaatcattgactgcccgtttacaagcggggacgtcagaaggttgttaagtcccataagaagaccgcctgccacaatagcgggaatgatgggcacgaaaatgtcactgagcatcttgatgaaacgctggaccacatttcccttcccctcttctttttcctccggcttttcctccaatgttcccagctgcttctgtacttcatcgcagaccatattcacaataccggaaccaaatatgatctggaactgggattgtgtgagaaacactccctttaccccttccaggtcactgattgcctcctcgtttcgcagcccgttatccctgagctgaaaacgaagtctggtggcacaatgggtaactgacttaatattgttttttccgcctacgtacttgatgaccagacttgccgtctttgcataatccatcatattccttcccctcttcttactatgatttccctttgctttttggtatcggttccataactatataatagggcattcagcccttaatgtcaatgttttattggcaccggttccatttttgagcgtaaaaaaatcgtctctgaatttgtgcacttttcacatatcttcttctatttctccctgcatgcttaaaaatcactttgttctttgacgctgtgaccttctatcattgtgtaatccactatctgcttttttggcaccggttcccgatgtatcatcttaagtatggtttcagcccccagataacccagaccataggaatcaaaacgcagggtggtcaggtccggctttaacagagtgctttcatcatatccgccaaatcctgccacggaaacatcctcgggaatccttaatcctctctcccccaaaacatggtacgcgccaaaagccaggcggtccgtggcacatatgattgcatctaccggaccctggtccatcatttcctcagccatgcggattccgctggcatagctgtaatccccggcagccgtgaccacatccttgatgccccattctttcaggccgtccatcacgccctgcttgcggttgatacccacggccacatccagggcagacactcccatatacccaacccgggccggacgggcctttgccacacggactcccatggcctttcctgccccgtaatcatcgtggacaatggaaattcccccgtcatagtcctgtgccaacaccaccacaggcacagggcttccctgtatcagcttacggtgcgcctctgttatggtaatggcgctcagtatgatgccgtccaccttcagcgtaatcagtctctgaatattcttaagctccaggtccacactgtggtccgaatccttaatcagcgtttcatacccctgttccctcaggtagcgtccgatgctggtcaccacacggctggacacctttgaattcagggtgggaaggaccactccaatcacattgctttccttggcctttaacctggcaaatgtattgggttcataattatactcccttatgatttcctgtatccgttccctggtggactctcttacactgcctccgttaaaatatctggacaccgtactcttggtaacccctgccatattggcaatatcatccatggtaatctttcctgatgacatatccatcccttcactttcatttgctgtgattatactgattgcagcggaagcataacagacgcagactcccagtacgccctgcaaagcgggtattgacagctgcgtctgcttccctgttatctcttgtgtattagtatatcaaaaccgcggcattctgtcctctattatcataaaataactgcactgtgcctcattaccccggtctgttttcataccacacctcagacaatctggcttccgaagggcatcagggccagtttcgccagcttgaactgctgcagcccaaagggtatgcccacgatggtaatacaaagcagtactccgatgatggctgactcaatggccaggggcaaaccggaaaccaacagccagataatattcagaagcagggacgccgctcccccgccgtagaccacttcctttccaaagggaaagaaactcaggcccgcaaacttaaaacactgcagtcccaccggtattcctatgatcgttatgcaccacaggcagcctgtcaggagccaggataagccgcttatacatccgccgaatataaaccataatacatttccaagacatcccatataccttacctaccttcctgttctgtttccagtgtctgcctcatctcctggagacgtttcctgataccgctcacctgacgtctggcttccctgacctggttcagagcatcccctattttagactgcaccatccagtcagctatgacaccgtcaaaaaagtaatcggcaaaggtcagaaaacttcccacatccatctttaaatccccggtcaggtttacatccagcaattctctctttaatctgcgcagatgtccccttgcctcattcatggctgcctgggcctcatccatccggttatgcttaaacatggtgctgaaaaatccgccgcccagcatatcccagattccccaactgcttgccttctgcagcagttcctccgccttttgcaggctcatggaagccatatctgctgccattaatgcctcactgatttcctgttgtctgctttttctctccattcttttctcctttctgcgataaacaataccttgctgttgtgtgaggcaggtattaccgccagctttgcatcagagaaaaaaagacctttatggtggctggctccctgccacaataaaagtcttgcacatttcattttatacgggtgcctccggcaccgagatgacgatttaaaatccaccttctggtggttcgctactcccttttattggaactgattatagcatgctgtatgatgaatgtcaaataccatatgctgaagaatctattacatttttcttagctgttttcttagcggccttcttagctgtcttctcagcggccttcttccgtcagtgcattacaattgttttccttgatgcactcccaagtcgtcgttccatagcaaatgaatgtgtgatataatttactaaatcaaatcggaaacagaggaggtcaaaaagtgaaaacaattgggctgattggcggaatgagttgggaaagtacagtttcatactaccagattataaatgaggaagttaaaagacggcttggcggacttcattctgcaaaggttattctttacagtgtggaatttgacgagatcgaaaaatgtcagtctgacggtgactggaaaaagagtggtgacatactgggaacggcagctaaaagcttagaagctgcaggtgcggacttcattctgatctgcacaaatacaatgcacaaggtagttcctcaaatcgaatccatgatacagattccgattatacatatagcggatgccgccgcacaagagcttctggcatgtcagattcggaaagtgggcttgttgggcacaaaatatacgatgacacaggatttttataagcagaggttaattgacagaggtatagacgttatcaccccggatgccgcggatattgatattgtgaatgatattatcttccatgaactctgcataggtaatatcagggaagaatcccgcagacaattccaggtagtcattgataatttaaaggcaaagggagcccatggtgttatccttggctgtactgaaatcgggcttcttatacatcagaccgattcttcactgcctgtttttgataccaccgtgatacacgcaaaacaggccgttgaactggcattagaggtttagtttcctttatttaaaatcaaatctgatggtttagacaatgaagcaaaccagcaaagcggaggatataaaacaatggacaactggtttacaatagataaaacagactcaaatacctacattatcagtgaataccggcattgggaggaaacgcactgctatttgctgaacggaagggaacgaagcttgcttattgacacaggacttggtatttcaaacatatttgatgaggtcgtaaaactcacggacaagcccattacggcagttgcaacgcatattcattgggatcatattggaggacacaaatattttccggatttttacgctcatgctgaagaattggactggctgaatggcaagttccctttatccatagaaacaattaaagagatggttgctgaccgctgcaatttacctgacggctttgatgtaaacgattatgagttttttcagggggtgccgtcaaaggttctgactgatcatgatataattgaccttggcgggaggcaggttgaagtgtttcatacgccgggacattcacctggacatttgtgtttttgggagaaagatacagggtatttatttacaggcgatttggtttacaaggatatactgtttgcgagtctgtgaaagtttttctgtaattaaagatttataaggtcttctatgataaaataaaaatcataggaggcctttttattatggcaagagaaaagaaatctgtacacaaagtgcaaatgacggatggaaagcgaaacatcatccggcagcttcttgaggagtatgagattgaatctgcccaggacattcaggatgccctcaaagatctactaggcggtaccatcaaagagatgatggaatccgagatggacgagcatcttggctatcgcaagtcagaacgttccgattgcgatgactatcgcaatggctataaaaccaaacaggtgaatagcagctatggaagcatgaaagtcgaagtcccacaggaccgtaactccacctttgaaccacaggtggtaaagaaacgccagaaagatatctctgatatcgatcagaagatcatatccatgtacgctaaagggatgacaacacggcagatctcggaaacactggaggatatctacggcttcgaggcctccgaaggcttcatttcggatgtgacggataagcttctgccccagattgaagactggcagaaccgccccctttccgatgtctatccggtgctttatatcgatgcaatccattattctgtacgggataacggcgtgatccgtaagctggcggcctatgttgtactggggattaattcagatggtttaaaagaggttctgaccatcgaggttggcgaaaatgagagtgccaagtactggctttccgttctgaacggtttaaaaaaccgtggagtaaaagacatcctgcttctctgtgccgatggactgacagggataaaggaagcgatagccgctgcctttccaaagacggaataccagaggtgcattgtccatcaggtgcggaatacgttaaaatacgtatcagacaaggaccgtaagctctttgcggcagatctcaaaacgatttaccaggcgccaacagaagagaaggcattagaagccttggagcggggcacaaaaaaatggtcagaaaagtacccgaattccatgaaaagctggcaccagaactgggacgcgatcgtccccatctttaagttttcaacgactgtacgcaaggttatatataccacgaacgcaatcgaaagcctgaacgccacataccggaagctgaatcgtcagaggagcgtgtttccaagcgatacagcccttttaaaggctctgtacttgtcaacatttgaagcaacaaagaagtggacgatgccaatccggaactggggccaggtatatggggaactgagcctcatgtatgagggccgactgccgatgtaagagaatccaggaccgttcaaaccaggcgggaatccacctggtcttgacatatgcagtattgtgcggtatatataaaccaagggctgaacgctcatagagaagctttcagccctgccattatcatagaagagctgcttttacagagatttcttcacacactcctgtttgcctattatccatctaccgacccggaggcatatcttaattcactaaaaaagatttcttccctgccggtaaagaaagtatttcctgcccatcattcactggatatacagccggaaatcttatttcgtatgcgaaaagcatttgagcagcttgaagcagacggaaaacttcatcatggcagcggcacatttaactatggcgactggggagtatggttgtaaatctcccccagccgtgatgtaacttcccatgccaaataatcaatggtgctgcctcacagagcgcaaatctatacatcttcccataaacaacaaatgcgaatggcctaagccattcgcaagtttcataattagtatatacagaaaaatctctattctatgtactctcatcaatggagcatacgggattcgaacccgcaaaatacaacggttttatgcgggttgtaggctccgtgttgcatttcgtgttgcatatttccgaagatggtactttatttatagaagcgtcagagtcaagttctggcgcttttatattgaattagaatcctctatgtaccagacattctgcgccccattatattgactatgccagcacgccccctccaatggaccgtctggtgtagggtcaaagtaataccaatcccccgaaccatcgtccgggtcacatgcacttccattccagcggtgccagctggtgcaagcatatccgtccttattaaacagataccaatggtgatttatgacacaccatttattagtcgggtaagttccatctggtctgcgataccaccaaccgttattatctttaatccagcctgtgcgctcctccgtaacccaggttttcataaattcatccgggttacgatacagtttcttgattccagatgtgctgcttccccaattcggcaactggaaatgtggcttgtccacaggagacttccaatttccaccccattcaagtcctaaagatacaccgatagcacctacacggttaaaaaagcccccaatttcattataagcaccagcgccgtcattgcggaagatatcaaaggcagtaccccactgatgataggaactgtagctgctgccaggagcattagtgacaatattccctggctgagttcgaccctgagcgtataaagcatcctgttctgccacggttcgcagtgtttcgcctatcttaatttttaatccctgtttattgcattcatccaccaactgacccgctaaaagctgcaagcgtggatggcacaatgtgatatctctcataatcatcctcctattatactgtttttctgctgcacagtaatccatccaagtaatacggcccggttaagctcgttaacggtcaatggtcctttaccattgttatatagcctttttaatgttgtatacatgttacacctccagctggcttaaaattattgcatccactgtatcctgcaatgtctgcactgtgtcccggatatctggcctacgaagtttaacaaccataacagtatccttcacttcattggtttcataatttggcgcttcctcggttccagtatttactgtttcagaggatataacataatccattttcttgcgcatttcaaccatctgagtaaatccggtttttacttctatcggctgaccgtccaaaccaagtatgtaaattctttctgtgtttgtcggattaaattcagtttctgccgtttcaaaactgtctaagcccggaagaaatgacagggttaggtaatcgccggattcttccaccccgtttgttattaattcgtattttgtgttgtttaatagttttaattggttcattttactcctttcatgggtatgtttttttatatagcaaatagcaatttagcggagaatttaggaaagcttatatcgttttcgtccgaaacaagttacacaagttcggctgaaatgatgaactatattcagaacacggcgcctattggatattccgttttatataacaacgcaaataacacaatatcaacatgttatacctacaaagcatctaataacacactgcatgtcatgcgcataacaaccaatggtcaatcaagcctagatgctgctttgcattggtgcagtggaggggcatggaacagcaagagaataaccccgacctaattgtacactttgctataataatcattttttaaagataactcgtattattattggtattgaaccagttgtattgatgcagtatcccataagcgataaagttccgcttgcattagcccgttgatttgccatgacgcgaagccatctgtcgccatatccatcctgcgcaaatgcggtaatagatacgatatcgctaaatgtaaagccggctggtggagatgatattgcataactggattcagtccacgtttttaacgtggtaatatttatagccgtagcataatccatcactacagtactattttctaaattcactaaattgctatttgcagtagcaatatcttgcttattttttgtgatttcttgctgcatcgaataagccagcgaggatgatggaactgtggtttccgaatttgtttgcacagttgaaatcaatgtttttagtgcatcaattatctgattagctttttcgactgtttcagccagtttattttctgttttattaagattgtcagcatcaatatctggttctgaattatttacataattagttggattatagttgttcattttttctaaatcatttattgccatgctctcctcctatatgctgcattttaattcccttaatgtcatattgacaactgatgtacttgctgtggttcgcataaatagcgatatatatataaatcgtgttccggtaatattggatacatcaaaactattcgtctttaaattgcccgatgtatttggtatttctctcctccaataatctcctagtccagtattataatcttttccggaaccactggacgctcgcatatatatgtaatcactaacatatccagtagccagaatcatttcacacccaccagatgcgttggcaagagaatatttcaatgttattcggttgatattatcaaagttaagaggaacattaaatacaattgccgttgttacataatctgtgctaagagggttttcgatatggatgttatctcgaccaaatgtcacgtctcccttgtagtacggcaaacctgccggccgaccaaatgaaggaaacgagcttactgattgtcctggtgcaaacacgccattataatatggtgtatacgggtcgttattttcatatccttcatattctcctacaatagttgtttccccgattttaataacaacacctttttttatattagatggtatcaaattggggagacttgcagtaacaacatcaccagtcatatattttccggttgttttaacagtctgtaactctgcgcggggaacaatgtattgttctcccaatgtaggaacattttgtattactgtactaccgttctcataaaatccttccccaagagttaaagtttgatttaactgtaattcgtatctattggatagaataattggcattgttccgacttgttcatcatcacttccacggcctaaaaatatttttccgttctttacgcttgatggaatggcagttaaatcacttgtatctgcgttagctccattttttttaattatacaatcagccatttcaatcaacccatccctcaaatgtccctgtatatggacctatttgtactccttttcttatcacatcatttgaaattcctacgatacctccaacaaaaacatcacctgtcatatatgtgcctttgactcctgctcttgtaccatttattgtcgggtcaacatattgtgctcctaaagttgggatatcctgttttaatgtaattgaaacaaaatacccctctggaatgtaaaatcttccgttaatcggaaaatcatgttctacattataataagtaggcatagttccttcttgtacgttttcggtcccggcgccaataaaagtctgcccatatttaacatcctctggctttgcagtgagataatcattattaaacataccaccattatagagtatacattctgccatattaatcacctgctcctttcaccagaatctgaaaatcggaagatggtttggaaccataacagtataatgtaacaattccatttccactttcggttctatcgacatatccaaaagccttttttctctctctggctacacttgcagttgggtcatctcccaagtatggaccgccaataataagtcccgtttcctcctttgctcccggtacactgaccgtctgagaatacgggacagatgtactccaatttgctgaaggaaccataatcctttttatacctttgatattttcgatttcagagttgttttgcaataccgctttgttggtttcattaatatcatccgcagaaaaaatatctccgatttcttgatactctgttttatcttcaagcgttgttaggccggttaatgtatctgtggtcattttgtatttacgcaggccagaaaacttatcatttttaaagtttgtttttaaattcatagtttgatacctctgttaccaaggactttggttcctaatttgaacgacaaatattgaggacccggataggatttttcaatcaaattgcctaaatcataaatgattttttcaatggcattggcttgataaattgatgtgtatgttatcttctcgggagtaagtggagtgctgctgtctgtatagtatgcatttcttattgcaactatattttttctcagacgttccatttctttatccgttctatggtcctctggtttccaatttagcttgttatttgttgtatttctatatccatactgattaaggacataagatacccatttaactgcctgttcgatacggttgaggtctttgtaatcaatgtaagctttgtcggttaattctattatgtctgactgagtacggtcaaaaataagggattctaaatacttactcatgtatttttacctctgccttaatttcgttgggagaaaagctataattatagctctcaatgatacctgtgcggtatccatcgtaatctgtatcaatcttgactttctgtcctaatttttttgttccaataagaacatcccccaccacattttctgctcgctgataatatgcatatacgcggtcaagcacctgctgcgcattaccactataaaccaatgttgcgtctgttacttcacggatgtttttattaaatataatatctggattttctttaaggattgatgtggtgagatggttgtatctcttaccaatcagtgttacatttccaccagttccagttatataggcatagttatccccatgctgaccaatgattccatcagttatgtccaggctgtgataaggctcgctaaaaataatctctgctgttccatttaaagtatcattatataattcttgcgtttcatcagatttttgataagtatgtactgtcagcctgattccagtaacaatatcagaatgctctaatgtaacaccggaaaacacttcatccgacaagaattcaccactcaaagcattctcctgtggatatataacaattccattataattgcttgtatctgcaatagctccaatagcaaagcatatgtatactaatgcgtttctctttgtggtatacggtatgtatccataaagcggaatatctgaaaatgattcatccaacaaataattaaaatcttcattctcaaatattttttctaatacttcagaaaccggctggcccgtatatattcctccagcgaactcattaccatccaatacacccactgcatcatgcgcgtccatatggtaatctgttttatttttccttgcgccgtttttaagataaaaatttcctatcaactcaccgttgaaatacaaagtaagtttctgctttttttgcaaatcaaacggtatattagatgttgttctgactgtaaaattcaaagtgttgatacttatgctttctgatatggcattgatttcttgtaaacagtttctttccagcaattcgttgtccagaaagtctctgtatattccataatctattctggtgacaaataccggcctgatgggttttgatgtctgtaaaaatgtgatttccagcttgttatatcctctcacataattattacaaaaatatcgcactgaatccgggtaaaactccatatctgacaataggctattatccgagtaccacttaattctcattctggtgcaataatcgcccgacatcatattaaaagtaaaaagcaaccctacactagtaaatttctgattaaatgtcactgttaacatgggggattcaatcaacgtttcagttgttgatttcgggtataaaaacattcctggatgcaaacccatttgaggtttaagcccctggctctgcttaacatacccaaacaatccctgctcatttgatacttccgggcttatgtatccgtaaggaagcggattatcaggaaaattaatatactttccatttagcaatgaaaatcttggaaaacataaagcgtatccaggataagaaatatcatcccgctttaattccgggaattcttgctctgttatcgtcccgcgcggatgtaagccagggcctggatgaagccctaatctcggtcttaatccaggtcttgtaatggatgctgtactattttctttggcataaggggccaaatcgtcataaacaatctttaatccctcagtgttctgttctgcgtcagataatatggattgctttaaaaacacatcacggcctcctctgcggctccatagcggtaaaggtaatagataacccggtccaatggttacgctgcccttcttttccattcttgttgatttttatttcatcatccccgcttgttatgtatgcttcaaactctttggtttcctgtccgtaaggaaataccatattgtgagactcaaccggggcagatatgatttcgtagaacgtatcatagtcagccggattacttctttctgcatcaatatcaagcgtataattgtaaaatgtaccaatgatatcccggtgcatccggtaagattgcaaacgtccagaattttcactatcagcaaccgaaaaattccgttttaaggattttacccatagacgaagattaactccgtctatggtaaatactccgtttccattctgcgccattatgcactcccttctgttaccatcgttacacctacacggttcttttcgtttttcccaaatttgaccacgagctgaccaaaccttgtaccatcaagtattagctctgctttggcaatctgatttccaccagatatattgctttctgccagtgcttctttaagggcttgcttcatagttgatagcggggataccacttctgtttcacggttattgtctcccaggatagccgcaaacattccggcccgtggtggtactactgtaccggttgcaagcatcggcattctatagggaaccgccgcataggcagacatggggtaggcacttcttcccccatacccaccagaatatccggcagatgcagcacgcttacctgcattaattgcgattgtagcagcagctattccggcggctaatgaagcagctacaacaccagctcctacgccaccagccaaagcgcccaaagcaaccgccaatattcctactgccgaagcagctgcaagtatacttgctataactttttctgttggtgacatgttattccagttcttggccaacacagcaatcagcgatattatgcctgatatagcaaggacaaggggatttatatttgatacagttcttgctaaaagtgaaataacacgttctccaattgccatgaaacctccaaggttgcttattaattgtcctatccccaatacaaattctgaaaacttccatgctgcaaaaaatgccagtactgcaagtgtaatattttctaccaatgtctggttttgacttacccagtctgaaaatctagtgagccattctacaattttttctaatgcagctatgataactcccccggtccactctcctaatggctgtaaaaattcttcccatagccatatccccaaaggcttaagtgcatcaatcacactatgtattgcttttaatgctgccgcaattaaatcaaatactgttggtaacgcttgctctactccccattttgcaatcggaagtaaaacgttgttcagaaaccacaatagtaaattacccacatcagatacaagcggtcttatagctattaatatccggtcaaaactttctaataatggtgagaagtccaaattgcctgaccactcttttaaactttctgatgcttgacggaaaaatcctgttatttcaagaatgatatctccaagatgccttaaaatgtttgttccagtatccccggatacccatgccttatcaaaattggtgactaaatttccgaccgtatcaaccagatttgcaaatgtgattagtaaatcatctgttattgctttcccatatccctctacgttccacacctgcatgaatgatgcgcccacatcacttgcaagttgtttaatagccgaaaaagtattttgcagtgatttcattacctgcgggccattttcaagccatgattccttaagcgggtcgaatagctttccgagcgtatcctttattgcttctgcctgcaacttaatgtcattggatacttcctcagtggtaaacatatcctccggtttaagttcgttcttatcttccttctttttctttccggttgttatctgtatcagcttatcaaatggtgctaatgccttttctgtttctttggctgcatctttagtttcatccttcgttttgtccaggctatccgcataatcctgctggaccttaaccgctttaacaaatgtatccttcccggttaatgctgccagcagttgcgccgtccaggtgacggcctgggatagcaaattgataaactgactcaaggccggggctgcatactcaaccaacggggaaaaggctgtggcgaaagagtttttaagttgagtcataccggacatcagcacggataacgccttattggtatcatccgaatactgggccagattatccataccttcttttaatccgcttgttactgcggaaatggcacgaaatacagtgctaaataagatagatgtcgcaagcattcggcccaatcccattcgtgcaccgcgagatgctttctcagtaccttttaaagatttattgagcttacttccacttttgcttgctttcttttgttcattatcaacaccgagcaattttttcttataatcctgcattgcttttttagcccgctgcaatcctgctaatgctttgtcgtatggtgcatctccaagtccataaccagccttttcggcgtaatacaatgcgtccttataccggtccacttcatcttgcaaattgcgtacactcggtgtaaggctttgtatagatttcgaagcagatgaaaatgtatgtttcattatgcttggtatatctttaaaagcctggggcagaagctttatgtaatccatcgttccagacagagttcttttaatatcttcgcttcctgtttttgcaccatccgttttgattttagtatctattaatacagttccatcaggttgcaaagatatcacctcactttagcaactctgcaaaataatcaaattcttctttagatttgtcagtggatttttcaagttcacatagctttttattgttctgtaaaaactcctgctcccacttttctaagcgcttcccttttgacagtttctgccggatagaaaggacctgagaaaacaatccgtccccaatttccatgaaccatccgtagaaagtccaccaatggattatctggcatccgcgtgtttcaaaccctgcaatcctgttaaccgccgggaaaataattcctgcgtcctgttcccagtcaattacgcgcggtgatggagtatcttcatgcaccacaccacagtcgataaaccataatgctttttctgccgcttctgttaaatcctgcggaggcgggataacgggccagtaaagaatttcaagcattgcttgtgttttctctgggtcagacaattcttcatccgcaaaggctgataaaatatctaatattgcccggaagtcctcacgaatttcataatttaccccattaacagagagagaatatgggagggaccacgctgcactcatttaacaggaaatggatattttccaggaccagcattatactgttgtgtatatttcccggctttactttccatttccgtgaaatttttacccgtttcctgctctataatttttttaacgctctcaagtatcaccagcgcccaagggtcgccattttccataggggtaaatggactggcgattttgaagaagccagaagtgtctgcgttaaatagataatcaaatttttcctgaagcgactttgcatatttattaattatctctaacgacatttcttccttcttcttgttatcaagagttgtttttaattccatccacatatcctcgaatgctttatacacattctgctgccgctcgaatatgtcaaggtcggttggaacaaatttgaaagttgccagcacatctccatgctggtccgtaaaatcgtagtatttaactgggctttcaatatttattggaatattaggcataatttatcctcctttactctgacaaagaagctccatcagccgtaaaagtcatcgttgtagggtttacagcgccaagagtcctatcacctacatagtgcaccgtatgcgttgcagaaacacctttcaggcctcctgcaaagtctcccaactcaacaacaccctcctgcacccatgcacgcatatttccggtactatcggttttgtatcgctttacacagagatatttcaatctcaaatctgacagagttgccctttcttccatgagcgtatctatcttctgagcgtatttactttctccagatacattggttgggtccactgtcatgctttctgcatagccggtgatgtcatagttattatttccaagcacatcctggctttcttccgtctctggattcatcgaaatcggcatatcttcaacgccttttccaataatttcaagtttatcttttgtgatatttgtggtgcttccatcagttatccaaaataccataaagtcttttctttttgcctctccatcggcataagtccacgttgccactgtctttctcctttcaaataaaaatatagcgccaccatacaaggctctgcgtcttagcgtctggctctaccatctttcaaaatcatatttatattctatcgatactggaagtatccaatcctgcacaccactttcctgcggttccaggccataagagttgtcacgggtaactttggttatctttcttccttgggataatgtgggataatttgataatcgttcctcactcccatcaatcacaaccggctcacgacacagccactttccgaacgtatcaagaaattcctgtatgctcattttctgacgctcttttgtggatgatgtacggtatataatatagaagggatactggcaggtctggcgcactccacctagtacatcctcagtctcagaaaagattaaggctccattatctgccgaaaatgcaatcccactatcctcatccaattcttcaaacttaacggtttcattttcatacaaaccggggaattgattaagcaaagcctttacagcaattgtcaacacatcatatccgcttgcatcttttcctattggttttcgttcatcacccacgctttccacctccagccgttttcttggcttgctttatccatgatttaccgtctgcctttttggccgcatcaaaccatttagcctgtgccttaggatgcgctgttttggtatactgtaaatcctcttttgctttggtttttcctctatattggcttactaatacctttttagtaccctttgtagcccaggtactaccagtaacaacgctaaccatagttttaccctgatataaaaaacgaccagcaggtccataggcagcatacacttttccaatcccttgtattgcagcacttgcgaccctggtaacatccacaaaatcgcctgtaatcataggcataaaaggaaccatactattcattacatttccgtcaagctcatattgagcatgctgaaattgtttatcaaaccgggataatttgagcgtaatctttatctctccatcaacaacggaaaagcctttaaaatgtgttgttttgcttgccatattatttccccaatatctcaaagtgaggaatcacagagtatggacctccaacagaggataccaaatatacgaagtcataccgattattcatataagcataaaaaccgtcacgataatcttcatcgtttaccgggccgttatcccataccccttcccagaaaaagcaattatccgatgcatcaaaggtaatggtatcgtccagcaaatcatttacctgtctcatccactccttcggaggaagccacggcaattctttaccgtcagcatcgcggattatctgtttaccatcctgtaactcgtatactatgtgtaactctgcattatccgtgctgtctggcccatacttttttagtattgcgcctttgtcggtattaaggtcaacgcctgataatacatgtggataccagataccaacaccagttgtggatgattcatagtagttaaatactgttactgtatcattgtacatattaatcacctattagcgtttcttttttctttgttcgatttttgacgcttcatccaatattctagacgagtcaaatatgtgacgcttttcaataatttgagaagcattagatacttttaataatacttctttcagttgtttgcctatttcttgcaaagattcaatttcattttgatattttttttgagcgcttggatacttctttatcctttcattagctaaatcaatatttctattgatagtatcaatagcattatttctaatttgttcggcccatttaacttgtttttctgaaccttttaaagttggcaatcctttgaaagaaattttctggtttttagcagataatccactcgccccacctctaccacccattgcacaacacctcattaaacttttctgtaaacgctcgtaccctcacgatattccccatgcactcatctggcacataaccataaaagataatcgtgtccgggcaaatgcgccgtaccatttccttgtagcctatcataaacaactctttcttttctttgctgttcatcacgcctaaagacgataccgccacaacaccaccctgtggctctccgtcaaagcaccattcaaagctgtcgggcgtactccatgaaatcgtgggaataacttgtatccctgcctcttgcagatatgcgcctacccaatgttttctataatgattgtatatctggatagcttttggaaagtctgtgtatgtggaaaagtctggagacattacataacggaatttttgtaacatgggtatgtatcggtcaacatccgtccataacctattgaattggtaatcatcaaggaagaaatgtacacctttcttttcaggctctttacaagtcttggcatagttgaaaccaatccattcacagcctttctcgtaggttactggttctatctgcggtattccgtattttcccacgccgtcaaatatctggcgctccagattttcataatttctgcggtttcggtagttactcatttcttagcctgcttatacatctggttaattcccgtagccgtaaggccagacatagatccaactgctacggccgtgatatagtccgatgccgggaaatctggtatagttcccataccaagcgctcccagaacgccacccacaacagccataatgaccggtatccattcgtccggtatcttttttgccgccttgcatccaaggccaaccacatagctcagagccacaatagccacacatgttcccaatgttgtaatgtccatatcttttcctttctggaatcagagcaaacccaattccatgaatactttgaaaatcttcggagactgaatagcgaaccagtcaatcatttcttcattagttgcccacgctccgcatgtatttgaacttgaagaatccagaccgctttcatacaaaaacgcatggatgagttcatgccgtaatatggcatttttatatccttcatagtcctttaattcgcaatcgtcctttttattgcaaatcacaatcatatgtgtagaaaaatcggtatatccatccctaaatttcccatccaggttttcatccgatttttcatcacgctggacaacttcccattccgttcccagaatgtttactttacaatcctgcatataaaagtggagtcccttcgttatcttttactcccatcagatacacctttgcggtatcatacaggggcttatttgtttcctgttcattccccgccgcagaatatatatcactccaggctttagctccgttagctatttctgacggggatgcatagctgattgattcggaaccggatgactttgacgtgataacgcctgtggttgcgccgccggtcacgctggttatacttcccgcggcggcagatagcgcctgtttttctaccagttccaaaccatacagtttatcagctaatgcacatacggctttcttgattttggtttgcactcgttcattatctgggaggccgtcaaccaatctgtcaaatgttattttatcaaggaagtcgcttgcccgttctgcctgcttatcaaatgattgggaatccggtatggaactgccgtagtattttgttgtgtaaaactcatagtctgcatatgccatgccggattctcctttctttaagagtgagacgttacatcgtcatttccagatttcaacgccttataggtattgtcacactcaactactgtgatatgattcccggtcgttgccttgatatcagatttaccgtcccatgctgtccacgtctttacattctgaccatatttcacttctggagcggaatcagctgccactttgtacttgtacatgtgtcctgtttcgaggggaggttcaacggttaattttgtgtttcctgatgtgcttccggccgaagaagttaccgtcagtgttccaagaacgggattatcagtaatatcaacaactgcgattccgtcaatatattctgcaaacaaggtaagtcccatgattgcaaatgcttcggaaacagcggtattgtaattaccctgggtatggaatccgataaggtttgtatccccgtccccagtcgtatacaccagaccggcacgtgcaaaatcactttcgtttgggtctacatagtacattacaatgttttccactggtgtagctattacttttccactttctatttcagaatcagatagcagaaagattgtattgaatcccatgaaatccttaagatactggaaaccaaactgattctgcacagtgatttcagcggcacccaggtactgatatacatccagaatattcacaaatccaaccacccccgtaacattacggtgcatctgtttgaatttgttttctaccattccttttgccatagcaagggccatctggaatgtagtttccgttccagtaagtgtaccagtattcagatatgtatagaatcgttctgttacattcgactgaagctggaacaaaaattcatcgtctgtcatctgaacggcattttcatagccgtggtctttaattgcttcaatggaaacggcctttgcatacttctcaatggtcatttccgcatacgtcttttcctttactgtgaatttgctgtaagggatttcctctccttcgcctacagccccgctctgtaaagttccttctgcatatttgcttttcagcactgcccccggcgttttcttgatggggcgcataatccccagaatgtcccgaagatgctgccagttcctttcaaagcgtgtcacaaaatcaatttcacgcgctgtaacctgtatgtccgcgcttttgattatattggcttttgctgccattactgttctcctttaccaaacaaatgtaggttactggcgattgcagactgacgctctgatgggtctttaatcgcttcaatatcctttcgtgtcatagttcctggcgcattctgcttacccaatggtgcggtaaacctcgccatgttccgctgtgcctgttgctgcgcatcatcaataaatgccgaagcatccttttctttcatttggcctataaggtcattcagccccagaattttaccatccttcagctttaatccggcctcttttacttctgccatgattgcacgtttagccgcttcgctggaaaacttaataccctcaaattctgttttaagagcatctgcaaaatcacgttcataaagctgtgcctgggcgctcttttcggcttctgtagctttctgtttccagtcagacagttctttctgcatcgtctccaggtcaaccccttcaaagcctttaagcgttgtttctgccgcttctgctttttctttccaggtatcccggtccgcgctcagattgtcgttttctttctgcaactttttgaggtctttcccattttcagccatgacaaaagatatctgttcctctgtcaatccctgtgcttttaattcttcggttttcattgatgattctccttttccgttattaggttatttgtaggtgtgtaaccgtccaccaacggttgccattttgtaggacttgacttgtccaaaaacgcacatgccggaaattgcatccgcttttcaacctccaggctgttcacgctatgcgctagaacctgtttcttttaaggacatgtgctataggatggaggtcaaatataagaaaaagccaaacaaactacattgctgtaatctgtttattcctactctcattttaacttattcgcaaaaaataatcgtccccacattttaatattaccccttgacacgccacgcaatgcgtggtaaaataaatacataagataaaggatgggggaaataaaaaatgatgagacgagcagagaatacaaaggaaatgagaaacgagctgaacggatataatatcctggtagaccgggccgactgccataaaatcattgcttttatgtttacccaggaaatgaccggaactgagaaacaggtggcatatgcaaaagatattctggtccagaaggtttttaagacagacgagatggccggaataatgatgtccaggggtaagatggatgcgcagagttacacggccggaattgaaagccttatcggtcagttagaaaaaatgacagatgccaaatacatcatacaacatgttaaataaggaggtcgttatgaacagaattaaagagtaccgtacgaaaaccaacatgacacaatctgatttatctgattaccttggtataccaacaaggaccatagaggattgggaggctgggaaacggaacccggctccctgggccgaagaattaatcatcagacaattggaagaactgattcatccatgtctgatgaaaaaacttttaaataatttttcagatttggcctatgagaaattgttaccggaaaattacaatgtattttctgattcccgcaacttttctcatgatgattattttaaaattatacatgacgaaatggcaaaaataggagttgaggacagcgattatgagtactgtccaaagagcatagaccccaattacctggaaaatgtgcgggcagggcgcgaggtacatgaaaccatattgtaaggaggagaaaaaatgaaaacatttaaaggatacataaattatggatgtttggctgctgagaaacatccggtatttactgagggcaatcctcatccaacagcagtagaaagcgaaccaatagaatacacagtgccagaaggatggggatgtgacgagacagaggccggcattgtgttgacggctccgtggggttggacttatacaccaaacgagctgattcaagggaaagaatcaccctgtctatgtgcaatcaataatgaagaaaaagaaatccatattatgttagattggaatcatatttaaaggagagaaaacaaatttttttggtaatacattttcaaaaagcggtgagattattcccaccgctttttgttacatcatattacgcaacttttcgatatatcttttcatggtttcccgttcctcgcggcaatcagcatcttttgacatttctcccaactcttcggttagttcgtccatatgttcctctaaggccgcaagcatacgccgcttgcaatcctcatcttttccaccacttctgtagctctgcttctgattcatgtagtcatcataggccggaccggtcgcacggctgtagtgtcctctgacgtaatgttttccacgtgtgccgcgataggagctgtcattatcatagtcctgcgacattccatcagcacggctataacgtcccatgctgtcgcgcttgcggcgcgcttcgctgtattctccgccatccatttcgtccattacctgattgtagtactcttttttgcacttccagtactccacattctccatgtctttccacatgtctatcagtttgtatgcggtttcaaggttgctagtgttcaggcccttttccgcaatcttatccagttcttcatggatattctgcatcatcttatagctcatagccttacccccttaacctattctgctaacaacaaggttagcgtctgataccgtcgccgctgtggctccaacgttttttactgatagggtagcacaacatggtttgcacacccttacttctacagttgccgctccattgattgttgcgccggcggcaaccgtgttctggattcttgcaccgggaatgccttcgccgtcctgctgtacttcaaaaataacgtcacctgctgcggctgcggaaaagtttccgttaaatcctacgcggtacaggccaggaagcaaaactaccctaccagagagtgcctcatgccttatgtttggacaattgcaagaatatatcctgtttgcagcaaacagaacgcttgcattgactgcaacagtctgtgtcccagcagttacaaaatctgccataataaatcctccttatatgcacagaagggcaagcttatgcctacccttccatgtgtgtaatactactgttcagtagacatgtccttttcggacaagatacgcaatatgcggttgttttggtcgataatcttttccatgtattccttattctcctgttgcaatgcttccataatatcattatttgacacatcaccaacaatcaaaagcaaatttatcatttgcaatgcagttgcatacagagcaagattatcgtaaaactgttcgtttctcattagcacccgcatccagtattgcatccacaaccacagttagaggcatatggatatggcgctggaaccgtataagccggtacaggctgcggctgacgaagctgtgcaacgatagtgttaccaactgcatcaataaagccgttctgggcagtctggcttgcctggaacctaagagtctgattttctgcctggaggctggaaattttgtcctgggtcaagaagtcaaggatagccctggtgttgctgttgttgttatccagtaaatcccttgttgcgttctggattgtatttctggtatcacatgattgtgtagccagattgtagtttacgccgtcaattgcgcgctgtgtctggcagcagcaatcctggagctgatagcccatctggcataagctgcggtcaacaccgttgaatccgctggtaatagtgttgttcagcgcgtatgtgctgtcacagataccctgctggatacctctaattccgttttctataccattcaaagcaaagccctcattgatatctgctctggttgcaagaccctggagtcccgcgccatttgcaccgttgccgccgaagccattgccccagcctccaccggcgaacaggaagagaacgataatccaaatccaatctccccacataccgtcaccatttctgttattgtttcctgtagcggctgcaatgtccgctaaagagtaaccactttccataaatatttactcctttaaatttatttacaaaatcatgcgcattgatttatgtactattttttcatgcctccaagcatctgctgaaactgctgtgccatctgctgggcttggtctaactgttgctgagttatctgaccagactggagcatcttctgcacttcttcctggggattccctttgaagttgttcttaaattccataaacttctgaatcatctgcattgggttgtttcccccgcccattccaggcatcatgccgcccattggtgagccgccgcccaacatgctaaataatggattcatatattatttcccctttccgcttggcgctgtgctggattctaaaaggccatataattcatcatattttgcctttaaatcctgatactcgtttctggtaacatacttttcatctagattttcagccggtgcagattccttcttctgcccattgacaatctctttatattcaaaagtgcgaagtgttggcattcctgccgcatcggttgttttaatataaaaatactcattttcgctgtccatcagcaatatagatgtgctgggcgctactaaatacgactttgcgccggcctcaccctgcacccataatattccctggttggtctgcgggacctgtggtacctgcgtctgttgcggcatctggtatggtgcctgtagctgctgcaatcggtccataggtggttgcatctgtggttgatatgggtatgcgtttggatatgtattcagatagtttggattgataaatggttgcggcattatatcccctccgtttttttataatccaattatcccataaaaaataagcctctgacagttcgtcaaagacttataaaagtatcataaaagtattatttttttctgttatctatatatggagtaattctattacacacccttatgattttattattgacttttcggctcaatctctttgccgtagatatactaatattcatccgctctgcgcattgttccaaagatatattctgtgcgcgcaattcaaataattgatgttcatcatttgtaaaattgcagtatacacggaaacaatttaattctaataccgtaaagtcatataccttcaaaaacacacctcttattatttctgcgcaagatacaaaataagtttttctctcgttttttttaactgttcaaggttgcttccaggccccgcgatttggctgtcaagcatcgttagcaatacttcaagaattagcgaatctctttcggcatacttcttcatgacatcgtaatctcgtctatcatgttcctctaatatctctacacgcttattcattttaatggcaggagatatccatttatgtattacagcaaacccaccacctaaaacagatatcgctccaaatattgccaaaaccgtttttccaaattccattatgtccatgttatcgcctttcccagtagtatattggtatctcctgcccgctgtcccatgtatcccagtaataaccatcctgcacacacaccacatgccctgtaattgctaagatgtacgttcctataggattatcctggcaaaagtcatcaaccgtgtaaacatcttgtccgtggtcattcactatgtaccgtttaaacccattttgacgtaggtatgcaccccacacatgattggctgatggcatatcagatagagcacacgcacatacagtcactccggcaaataccgtttcccagtcgctatctagggctttggttatagcccggatggggcagtcccctacgcgggcatttttaggatttggattatatggtttccatctgctcatttctattctccatttttaaaatatcaaatatttctttacaggtagaaatattcaaaggtattcccttttctctataaccactccgcatatagtaatttattacctctttcggaatttcccatgtttcatccttgggaacgtcattaaaattaatttcgttcatttaattccctttcacattctgataccgccgcgctgcgcccctagcctttgccgcctgctcccggttccatctggcaatctgtaaccgttcttgctgggtgcgcaagtcgttcgttttacaaaattcgttatatgccttattctgcttctgtaacagatacgacttgcggtcaaggtctaactgcatttcaaatttagttgattcatccttgcatttatccacggcctcctgcatccccatgacctcgcgtttggtctttctgatgcgccgttcaagcgttcgctgtcgtttctctaactgctcaaccttgtaattgtctgcggtctggatatctttatatgaattatttataccatccccactgccgaaactatgacggcagttccatccacataatccttcacccgttccatagccagtctgagaaaacggaggaaaacgcttatcctttccagtcctgctgtaaaactgaccttgccaccataaatgattgcttggattctgcccactgtctccagttctggccccgatgtgcgccgacaccagtatgatatcccagtccatttcctccatgcgcttaatagatatatcacctgtagcctgggccactccggtacgtactgcacgcgctgtagcggtctctatggtatctttgtggcccgaaggataatgtactatcactccgcccgataccacattattaactgcccctttgacagcctgtgtgtatgatacagccccagaagatacaaggtgatatgcattatcacattcgtttataaaaagcctttgtgcggcttctgctgtggtcctagtatagttttcccactcccccatagtagcagtcatgtttcgttccatcaatcgaataagctgcggtgattgggtaagcggtgttggagacaaaccagcagcttcatatattttatggtcatattccagggccttgactccagcttcttccattgcggacttgatttcttttttctgccgcttagtgactttggataactctgccgttatatcctccagcagatatcctgcatcctgcaatatctgtatgcgccatcggtcagaggaggtgagcaggtaatcatcgccacggcctatgcgtatcatcatgcggtctattatctgacggataatgtatgtatggagctgtgaggctatttcttcgcttccttctgcgattcttgcaaggtactcagggcttaacatttactcttccttctttcccttatgtccaattgcccattcaagcactttcggagcaaatgggccaagtgggatattgaatactatccaaattaataagtttatcaatttattcctcctcaaacatcctcggccaatccttcggttgtgcttcctgtaccatagcctttgcatcctcctcggataacccttcaaacttctggaaatacatccagggtggtaccttcccctgcacaacatactgccaccatcttgctctgtcctcttcacgattgtatgtaatgtccccaaaatcatatgtgatttcgtagttgccggcgggtgccagtccgtacaggtcagcatatacattgagcgcatatattgcgccatcaaggcaactttccagtttgtcgcgcacatccttaattaactggatagtgcggcggtcatcagcttctacttgtgttgctgtgaccatacctgttttttcatcaagcacaaaatatccgttggaatatccacacttaaatcccaggaaagaaagtaagttattaattccggttattctggtatcagtatttaatgatggattaatctcatggtaaaattccccattactatttccaaatacatttcttacataatgtggtaatttaactttatttactcctggacgttttaaattagttccatcaccaagcattaattggtcatcaattaatatgattttctcactgtcaaatatttcacctacattccggctatatgccacatccaggtcctttaattcttctatggcctcggcaaacattgacaatcccaaaggtgatgagatatccaaattgttagcctgtggagtgcggagtacaccaaacatggggccgtctattttatcattgttagccttgagtataggcggtgtctctggaagtaagtcagaccacttagtcctgtttaatgctatcgggtcccccacactttttgcagactgagacacataagctctattggatatgtaatatgggtaatatgtgttttccccatccttgacctcgacaaaccgatgatactcaaaccgggtataatacttatcattttcgctgtagctatccttgaatacaatcccatagataccttcattgtcacaatccgtaataataaagtccattggcgtgaatatgtccagtcccttaccgtttggcttaagtatgattgtgccgtaggccataccatattctacccagtggcgaatctgaaaatatatcttatcaatctgctcctggagccacgccgcccgcgcgctcccatcaatctgtattccgattgccagggtagcaagccgggccgtctctgaacagatagcctttgcaaaattgattgtcttaacgttatcatcagcatttacccaatagggagtgccccggtagatattggcgcactctgtaatcttgctttccatctccggggataccactgattcaatgttgaaatcttcttctgcctgtcgcttgaatatcattcctatcacctttttagcccatgttattagtcccatttactcacccgaaataaattctacatccttaaacttagccaaaaccttaatgttttttctaagtaaatacgttttttcatcgtcatactctatatcaacaagtccatcctcgataagtattcttttaatatttttcacttcaataacatcttcttttatttttatagattttagcattacgcgctgttcccccttctcatggataatgggcttgtggcatagcggagtgcatcaatccagtggtcgtttccatctgggtaatctgctatcacttctccattgctatcaacctcatgctcatattctatgatttctttatatgcccgtggtgtacgtgccgggtctataacgattgtacggcattgcaaccactcaaaggtatatttcctactacccggtgttacaatggctttacgtgccggtaaaccagcgtcacggaagtctataatactttcttcttcatccacaccgcaatagattgtataatcatcgtacccagccgcctgtatatcctccgccatcttactattacggattttacatccccccatttcgtcaagcagcacaactaattctttgtttggtatgtaagcggcccggataaaggctttggggtccgggaaccagccccagtcttgcccctggtatatgctttgatatcccttgatttcatcatccgtaatggtcctcacatccagcatatcaaatatatttgtaccaagtccaaccggcaagcctaaatactcatgattatatgcacgctcattggtcgctttaagatgtttggcgcgctcaataaacatttctcctaaccactcttccggcacagaacggtaatcgcttttatgcctatacgcactatcgtctggcgtatttacatactgattcgcccagttgctttgactgataggtggattgaaggatttaaatacaacaaacttgctgccgcctcgtaatactgactgttcaactgttcgtatttctttcggtcctgcaaattcgtccagttcttcacaattttgttacgcatataccgtttccgtatacactcaccatattactatggtgttcagactatatcatgtaaatggaatctgttaccaattccactcaccccactttttcaacctcactcgaggcttactctactcgttctcagttatagatttctctataacctacctttcgatagtcgttgcacattattattcgacattcttatagctttttcttcttacgcatttatcaattacagaaggacttacattatatttttttgctagagcgttcattccaaactctttatcatgtcccttataaattctgcgaatttctctcacttcatcttcgctcaaaacatgattcccttgtaaatatcctcgaactggcttttttaagccatttgcataagcatgctgcatttgctcctcgcgggtagcccattctaaattgtctgcgttgttattggatttatctccatcaatgtgattaactgtaggtttattttctgggttattaacaaaagcctcagccacaagcctatttgctcgctttgtgtactgtttgccattcatgcacaagttgtaccatacataaccatcatgcgatactctttgctttaaaatgacttctcggccatgcttatggctttttacccttcctgtattgctaatctcatagtcctcaaaccctttaataattctccaaatttctttcatggtattttctccttaaattcgtttattatattgtaccataaaagatgaatttattaaatattatgtcgaataatctttgctcaggattgtcctattttgtaggagtttccctgaatttaatgggtttaacgtggtcagaagtgtttaaccacaaatatttgaagtatcccttactagctttaattgactttgttttctttgccttgtcaagtccacggaatattatcttttgtcctgtcggcttataaacaaatcggtatgggcttgtacgggattcccacaaattcgtaacgcctagtgcatctatggcccactgtatctgctcaaatactgattccccaatggttacggcatatttacggaatataacagcattggcctctgggtcgtccatcatacctagcacaatctccgctgatataaatgaggactttgcggaacctcgcccgccgtacaggtcgtaatatgtatgattaccgtccagaatatcccagtgaacggcatagaaggaaggggcgattacatcagtcagatttattatgtcactcatgcatcatcattccctttctccggttttggtatatcattcagtatagtgactccttgtgcattttctcctttttttgtattatccataaacttatcaactactatccccatcgctgttgcaatttgggagatagtagcattttctagcttatgtgggtccgccagcttttcaagatatttatcaataataccctgtgcttgttctttcctggaatccatatatgccaacatatcggctgtgttctgttcttttttttgtgcgcacttctgcgcaatatctgcactttttgcgcatatgttttttactgtgttatctgaaacaccgaatttttttgctgtggcacgatagcttccagattccacataatcagctattattttctttttctgtttatctgttaatctggaagccacgctcaccacctcttattctctgtgcttcacacggtattatagtcctatactaattttaccatgcgtggttaatgtaaatcgtccccacattttataccattataaaaattcgtctggaatttttatatgaagttcatttcctttcatttctccataaagttttgtatatttaggaatgtgcgaaactacatttaaaaaataatgtccagaaaagcatcttgtcccttttatttttgtcactttgtaatctgattctgggttttttccagcagatattttaattacgcctttgtcaaatttaacctcagctaaatcagggtcatttaaagcatcacgcgcacaagcatttagttttatatgtctattgtcaaaatacactgcacacctatcttctctaactcctattaacggtattcccttgcttattttcatagctatcctttccacctcccaaacaatgtcattaaccgcctatattcatccagcgtttttctttggtatccatagaagtcatcccgtttgataggtatgttctttcgcttactcagcttatcatagccgatatttcccacaaggctctcgtatatctccacctccaggccaggagccgaggatatggcgcactggaacaatgttagcttatcttctacgctggcggtctggcagtattcttttatgcgtttggcttcatcatcggtaatgccataatcactatagttcttgtccctggtcctcatgtccctccttcttacacatttaccctttctcttaccgaacgaagggtatgtggcgtagactgtgcataataccgcgccgtaacccccgggtctgcatgtcccataatttcctgtatggtcccaatatcaacccctctgtttttcagattcattcccagcgtcttgcgtgacttatgcggatatacccggcatgttagttcagctctctttcttatggttttcaatatcgcccgaaatccacaagtagtcatctttccatacggttttctggagcgtgggaacatatatagacaatcatctttcctgctgtccaaatacaggccataataatgccgcgcatcatcatccagatagattgtgcgatattttccgcttttctctccctgtatacatatgtcgccggttctcatatctacctggtccaaggctatttccgcaatttctcctatcctggccccagtactgcgcaacacctccagcaatgccctctcacggatatttttggacgcatcccttaactttgctgattcttccgggctgtagtaatcaataggtttaatgggtactttcttggcaggtatagactctaccggattatctgcaataagcttttcaaggcgcatccatgtaaaaaatgctgacagaaaacggcgctcgttattataagtgctaggctggtttttctttcctccactggacacatttctgatttcatatcgcgataaataccaatcaatatcagtggtgtccatctggtccagtgattttgtgcttatctctgtcagcaatcttcgtatggcgttaagatagttttctttggttcctctcgctaaatcgcgttttttgaccaggaataattgtattatatactgatttctttggcttatatcatcctttctttctgcgggtagtgtagttatttcctccatattcacccttaccaattcctgctgcattacattttgcagaatggtaagcgtctgttgctccatgatatataaggacattgctaccagtacattattgattatttcagcttttattgtctgtgtactcataattatatcctcctcattcgtattgattttcacgtctgagtaaggtataatatactcagacgtatttacgggagcggtggaatcatcttggcgggtgtccaccgctcagtttttattctgtgcatataattttttcctcaatttgttttttcttaggttagaaaattttaattttgcggcatcgcgtattctggatttttaatgttccaccccatatacgtcatttccgaaaatacttctgtagtcctcaacatatccgaatactcgccgcacagcacccgattttttaatgggattccatcaggggtacaaaatattctacagccctgcatttctatattgtgaccgcgaaccacggttccatcttgttttgtgattttcatgtattcctcctttaaatgctaattctggtgtgcaaacagccaccataataccaccagatacaatgcccaaaccacattatcgcacttcctatcccattgtagttcttggtactgcatccactccatgccgtaccagaccgcggatattgccatgcttaccaccaatgccttaattagtgacaattccattcctccttcaaatttcgattttgaataattgccggtactggctcccagctttggctttggcccaatcaacggccccggctgccgtccaactttggcatggcgctcccgttgctttctcggcgcgttatcagctcaccctcttttttattgtctatctggtttttgctccagagatttttttacaaggtccctcgttcgtccttgcaccgtatatccgatatgccagattaacgatatagtggatgtgcgccagaccggaacccctggccgtatggtcctccattatctctccataggcacatccgctgctggtcttactggttgtgcatacaccagagccatgccagctatctttacgcagtcgcggtcctgcgaatcaggtaccggtatgcgctgctgtgttataagctacgattttgctaacttacaaatgctttgtattcctcataatctaccagcacggtatcatattcatcccattttcgcaccaaatccatggtcatttttacaggcttgtcacactttataacaccatgtccataatgcttctggaaatcctcaagactatataattcgcacttgtcataatctatggtgcctaaatatccagtaaaacaacgctcctgctcatccttggtcctttcccatccccataaagtgaatcgggttccggcagagtgcttgatacttacggctaaatattttctatccttcattcctctgcctccatgcgccactcaatatcccatttgattctctgcccacagtgtccacaatatggataatttgaattaaccccttcaccgcaagatgggcacaatccgatattctctttgtctttaataaaacacctttcatcctctggtttttttgctatctgtttctgtagagctgatatgacagcctcaacatttttcaatggtatatgtctaaatgacttaacctcttggcatcccatcaattttgcatttttaactaccattgataggtctttcgcgattccttcttcaatcatttctcttcctcctgatgcatttcgtcatattggtactgtaaacggcattctttacaggttccgtaaggttctccatctccacccatggttcttaatccggcacataagccttcttccatccctggatattcaaatttggtcatatagcaatgagcaatcgcatcttcaatccttttttcatctgcctttatctttttgtattcccaatccaaaagcatgagcaaatccgctcttgttgtcgcattatgagtttccagacttaactcccgctctattaaacccatctttttttcgtacggcaaccattcaaatctttctttgtcatacttcattccttctcctccttatatggttccggtaatggcatccaggccagcacgtccagtttttcccacccatcagtaaatgttgctccgttccaaaatgccctaatcacacagtctgtatttttgacagacactaaatatagttctaatggcttgttatcatatagcggattttcttttggtttctttgggagccgttccgaagcgggaatccacgcatcgcccagggccgcaatagcttccattgcacgccaaactccattagccgcttcctggtcatgttcttctctttttatgcgctcatacagtcttgctaatgtgtcgattgctttttctttttccaaatattttttcattctcgttcctccgctaaatacgtgttttgattacttggacgcctagaaaaatcaggacatatttcagtcctatcatatgccggtcgaagaaatgctttagtcataggtgatgggtatttctccatttccttaatcgctgccattctttgacgttccgaattctcgctatattgatttttcattttgttatctggcaattcaattcccccttgcctgaatgttatccttggtatcgcatgtgtaatgcattcctggtattgttatagttctagggcattcatccacataatcaatcaaccctatctctttcatatcccgcatatatccccagatagtagagcttgacgtataaccaaccccgtcccctatttccctggttgtggggggataatcatgctctaacatgtattgctttacaaacaccaggatttttttatgtatttccttcaactccccactcctatcctctcattccttctataagcgctttccggttctgctctgctatcagttccctgacggattcttccggaaatggcagttggaaggtacgctccttgattctattggttatcctgtcatcatatcgcaagtcctgcaggcttagattgctggtatacatcgttatcagcttgtcctggtaccgtccatttatgatgctgtaaaaccgttctcctatccagtcctttggaatctctgttccgaaatcatctatcaccaagacctggacagtggataacgctcttagcaagtcactctcacttctgtccttatcatcccatgtggccttaatctcattgataatctgcatagaaccggcaaacttaacctgcgtcctgtatgtactgaccatctcgtttgctatgctggcggccatccgtgtcttgcctgaccccttggtcccagaatacaagtacagtcccatcccgtccttccgcatcctttccaggttttccagatagtatttaattgctgctcccgtgttcctgattatcttctggctctcattcttcctgtataccccaaggtcaaaggagcggatatccaggtttttaaatgcttctggtatgttcgcaaattcaagcttcctgtctgctatctgtcgttctaccagcccgcaatcgcatctgtatccgttttcccggccttcctcgtcacaccagtacacccaccctgtaccgtggcatattgggcaaacatcagaatccagtaaatccttccccagctccttcgaggtagtcatctttatacgtttgcgttccccctgtattctgctgaccatctcctgtaatgggtccatttctatctcctttcaagtaatccgcaaacggcgtattggggccaaaaaatgtagccgcatgtttgatataccgttcttccgtgtgcatacttttacaatcatcagcgtatcttttaactgctgtttccagctcgtcctctgaaaatccatcagataagcgcgccttatatgccttataggccgctgctttctctttttttctcgggtacgcttgccatatctgttcaaaacgcacacaatagttttttttatcttttacattatcatttacattatcattatcatttacattatcatgtttttttgcttcggtttgattttccaaaaaaacatttgctttttttgattctgaacttttatcaaatgaagcacttccttttggccttcctccaagtttccccgcttctcttctggattctatcatcttctggtacttctgattatctctatcaagctgagccttgatgaaactaaaagccatttgtgtcattccatccatctgtggaagttccttatccgctgcatataacatgatagcagtaaatagatttcctctctgctccatgttcagtagtaaaatttggtctatatttgctgtatacattacaaaactttctctcataatcctgcaccaaacatactcagttgcccaggaaatccggtatcttttcttttagtgttcttattttgttttataaagagctgtgcgccaagctctgccgcctttatgctctctatccggctattctggctttcaatccatttataggcttcctgccgcccttgtgcatcatcaggaggtatatagtaacctttccctttcgacaatgtaagaatcaccttatcgtgtcttaacatttcaatcgcggttcgtatgtctctatcttcttctcctgtcttagataccagttcatctcggttcaatgcattctcttttcctacaaggattacattatatacccttgcctgaacttcttcgctaacagttcttttattcttcaaataatccctcctttcgggccgggtaaaggaggtttgataggtcccggcccagggtcagaaagtatatcgtgacatattagcaatctgaccagtaatcattaccgttgtatgtatcatcctttataggattagataccaatcttatatttttctattggacttatttgtttttcagcatcaatagcaattaaaatcgctacattagctttggcttctgacattccataatcattaatcagaatattacgaactgcccaaatagaagaagaaagtgtaaaaagcaaattctgaatttcctgattcatgtactaatcatctccaaatttaattccatataccttatatctactttcaaactctgccatgccaatgctatgtgcttctgtatggtgcttccggcatagacatattttgcgataatccgaatcatcaactttcctgcggtcatttcccatgccgatagtatctacatggtgtatctctccatccctaccgcatatagcacacttccgaagctttaaacatgcatacaggtaatgtcctatatcatcggtacggttaagggcaaaatccagtaatggtatcccctgttccagcgcataatccagcatggtattaataaattccctggcagtatccatggaacaatccgacagggaaaaatatccgcatccggtccgattgatatgtaaatacttaagccactctttctcgacctctgacacattcccggaataagccgatatgtcattgactgtggcataaatctttcggcgctggtctgaactgatgtgcctgccatcgttaagccatatgctgcaactattcatgtgcttctcaataatcggttccatgagattcttcccaggaataaatatcttcaaatatgtcccctcaggaaccagcttgtatgctgttatatccgctgactcatgcatataatcacctctttaattccagggaagtccactatcctgcatatcatttggaggctgggttgctgactctttatctggattctttttcagctttataattgtttcattcgcctgggaattggtcatatcatggatatcagtcagtccatactttgatagcacattcttaatccctattcctgtccgtttcagctccaggaatatttcattgatatcagattcagtaatcaaatcaggattattctgcttattgtatttagttcggtctgaatcccaatacacatcagcgccaatcccaagctgcttacacgctaccgatatagcatctgtggttgccatcttataacattcgtccgaaacgtatatgccggatttctcttttgatgcaaacatgctgccgccgtttcctggtattggtttagaccattccccatcaacctttacgtataactcgatatccacaaaagctgctatctcattacccgatgtttccaaccacttcttcgttgggatgtagtaccatcctatcccacatggcccgaactgctcagtaaggacttttatgcgccacatggggttaatatcggtcataccgcttgtacggcctcccttaatggttttcttggcgctatctgggacagaacggaccttttcgtataagtcaagattccccatcttttccctccttcataagcgttccaactatatagaggatagccatttcaagctcctttcttgcaacacttccaataggcaagagtgactgtttatcccggagataagataccattgcagtaccgtcaatcgtcttgtgttccagattcatgttttataatctccttataatgctgtttatgatgttctctgtccttccccctgcatttatcacattctttccaatgttccgggtcaagaaaacatccacaagaatcacatttagaattattcatcatgtgttttatccttaggaacttcaaccggtacacctctcaaaataccgaccagcacattacgacgggcatattcatcggtatccaaaaaaatcaaagctgcatttacccgaccttcaagctcaataagctttctatattcattggcagaaatttcaactgttctttcttccatcttgcaaacctccataatctctgatataatcagactgagttattttttgtatccggtcgtttagctctgtcaagctgacgaccttttttattggcttaccatatccagtgtaccgactggcatttgtcattgctccggcccggttggtgccattccggcggcggctcataacatcaccgccatgcatatcaccagcaatccgcttaagaccatcaccgtagcggtcaagccgcgaataatcatacggtctttctgccgtgggcttaagtgtgttttaccaacaggtatgtattcaagctgtttcaacaaatttcatctccttcccggtcaattgcagaagtatctgcaatttttctattgtcagtttttgagggttggctttacgctctctaaacgagcttgtgcaaaaccccaaatacaaggccagctcattatcatcaaagttatttcttattttggcttcttctatcagtagccggatgctgtccttttgccattctgacggcttcttagatttcacgtcctcacttcctttcgtttatacattccaggataaattatcttctactatctcttttacatccacaccaagagcatttgccatgcgtccggcacacacaggtgtaacttcccgcatatttaaaataacattcatacgcgcccgactcactccataccgtttggaaagatttgttatagtcaaagaatttctagccagagcaatatcaattttatctctactaagtttcacctcttactacctcctatcaacttttttcaaatactggtaaagcgctattgctataattattagtatctctgcaaaaacagtgcaaacaactcctgcaaaaaatggattaatgtacatcgtttatctccttctcttcctcttgattccccggctctttccgttcttcttaatcctggctctctgtcccattctctaaatctccttgtgttcctgtattgatgttgttcagtccggtgccatcttgggaaacataatcatatgtgccggcagtataaagccatgcggcattggttcctatcagcgctgccagcgttaccaggaacgctataaaccaatgctttgcattcctcttgctttgctctattacctctacagcaaaatactgctccagcccttcccatgttggcttgtccttctggttttcaatgttcacaaatattttcctcctgtgcttgcgtaatacaggagaaaatggtaaaatattcctgtatccgcattagtgtggttaatgtggttacggctccggttggtgtttgcggcaccgccggggcatttttatgctatgttcaaattcatctgcgcattagatgcctcaatcatctcaaccagataggtgggcgcgctgtagcaatcaatcaactcatgagcatccaccaagtatttcctttttaatgccttaaatgattttgggtgccctgtatcatcatatataccaaactcccgtttaagctgttcgtagatatctcggtataccttggaccggagcacggaatctctgtaggcattcgatttcttcccgcccaggatactggtccctttccttttcacatgccctgaaagttcatcagcctccgagccatagagagggatatcgaattccagtcgctctatccgcttctccatcttaacctgtttctcgtcaatcatcaggattgctttcatttccgtggacatgttcggattttcataatatccattctgacggatggatgggagcacttcatcgaatacccatgattcaaagcgttctgctgattccagtttactgtgggtgatgagacgatacatatcgccttcggggattaatgctacttcccgaccaccctctttaaagttgtcgtgtttcacgacacctttacaatgtcttgcaattgcgtctctgggattgctgtagcccaatgcattggctacatcttttcctacaaaataaatctttccttcaatctctacagtccgtatctgcccgaactcagggctgttaaaaatttttaaatcgttcattttatatgtcctccttgattgtcttttttctccccctgtcctatactgtatatacaggcgttgccgcgccgagtacataagaaaggagataatatgtctgaaaacgcaatgttgcttcttcgtaaaatggccaatgaatttgataaaacgaagcgtaaatcttttgattctgacttttatattgctttctctgatagaattattaatgaattagaatcatatggatatatcatttgccgaaatgatgttatagcttcaatagaattaacgtcttccggatacgaaaaggcaaccaattaattcctaagagccgtcttgtcgggcggctctactccaatcagagtatttgttaccctatcaacctttccatcttccaaaaattcaaaatcattcaagtcaaaagaaatactaacttctggatttttgcccgcttcgtgaatatatgaaacagacgaaacgcctttacccatagactttccacatacttcaaaataagaatgttttccatcactgactaacctaaactttggtccgttcatgcattcatgctccttttattgtttataaaattatcaagattcagttgctcatattctggaaccctcacaatatccgaaggaagcttgataccgtactgctcacaaaccatccatgccatttcaacggacttgtaaggggcactcccttgcttgtccatcctgttagagaggattttgattaggtttgctacttctcctggatgctctgtcaatgtgacctgtttcgactgattttccatgtcgtgaaatcgattgatgtacctcgccgtaaattctgttcccttctgcccggtcattttgtgagctatgaactcgcagcccttctttgtgaccaggtaacagggacgtgtctggttattggcatcctgatatgtactctcctggaaaaaatcgcccagcgcaattttgctctcggctaattgccctacataccttctgatatcccgcaataattctttgtgttctttgccgcaccactcagcggcttccatcgatgtgatggttgttcttgttaaatcgttcattttaaacctcctgttccacagactcttttcttttgattaggaaattaactgcctgtctaatctgagaatcagaacacgtaatagctgttttcattaacttgaaaagattgtcatttgagttcaattcttttactatataattcacttcaatctcctttcacttttattaaatcaatgaactttgaaacgctactaccgttccaagaacctcagggcactcatcgtaaaatatgggttcatagttttcgctatacggaaacaatattgcgaatccatttgatatgaacaatcttcctatcattgccgtttctccgttcaaaacaactgcgatttctctatctttcggctttcttcttttaacaaaaacaatatcgtttttcaaaatcctgattttctccatggaggaatcagaaactttcatacaaaaatcagcatctattacgttcatttgaacctccaagaaatttattgatgaaatactgctgtcctttgccagttaccttgacggtcttggaaatagtcacatggccgtcagaatgagtaattgctgtttccttaacctcaaacatccccatttccatacttctctgcatcggcatattccaatcggctccataccgcttgataagataaccgttatctctcagccatgcaaacagacgtttttgtccgatttccacaccgttctgtttcagcagctttgcaaggtctccaataaggattgatgtatgacttgtggctactgcatcggcgaaaacttctttcggcttcatgcgctggacatcttccagaagcaaagaattttcgcctttcagcttgtcaatggttttgtctgccatttttaacgccctggcaaatacctgctccggcgtgttccatgccttttccaaatcaagaaaatactggcgaatctgcattcctttatcagttctttgtaacatacaaatctgttttgccatatctactgacaaatcataatcttccacttctctggaaacttctctatttccttcaatttgaacccgtacttttttgtacggggttgaataatcaactcgctctctaaaaccatattttatgtatctgtcaaaccacttgctaaatcgttctgttccagaaagccctccttcgcttgaaagtaaatcatataaatctcttgccgatacagtcggctgttcagcatcataattaatttttataatttcttccataaaaactcctactctaagaaatactcaattgataccccaaagtacttcgccagcaccgccagtttgtccactttaggtttactgcggccatcacgccagtcgtacaatgttgctgttgctattcctgtatcagcagaaacccgataaatagttttgttggtttcttccaataacagcgcaaattttttgtacactttttcaccgcctttcttagataaaatgattgtaaatatatcggaaatatgatatagtcaaggtaccagcaaaaccaatcacattttcgagatacgaaatccgtttgtatcacggttttctttcgtatctttactatatcacggttttgttttatagtcaatacattttaagaaatttttccgtgatattttggagggatattatgtacaaaaaatttgaaatgcttttggaacgagaccacataactccgtatagggtctataaggataccggaatatcaacagctacattgtcagactggaaaaatggaaagagccaacctaaaaaagataaaatagaaaagctgtgcgaatactttaatgttcctctttcttatttttatggagaagatgaagatacaccaaaatattatctaaatgaggaaaccgcagctatagcccaagatatttttgaaaacaaagaactgcggttgttattcgatgccgctaaagacgctaatccagaggatttgaaaactacacacgatatgttgcttgctttaaagagaaaggaacggggtaatattgattgactacaatgtccaattgattagctttccatctggaaaagtacatgaagccgtaacgcctaatgaggatggaaccgttactatatttttagataaaaatgcaaccagggaatctcaaagacagaggttctggcatgttatgaggcacttagagggaaatgattttgaaaaaaatgatgtgcagaacattgaatatgatgcacattatgggggatattcatgagtataaaaggcaaatctcaagagttgtacataggaaaaacagaggttaacataaaagattatcaatggggatataaattaataaaaatccattatagtgatatttcaaaaattgaatattgttttcgtaccatgaccgaaggtggatatattgattttcatgatacatatggacattttgaaaggttttgcttcccgcgaaaatcgaatgcagcaatacaacgagcaatagattatatcgaagaacgataccctgatttaataattgaaaaacataatacagatgatgaccctatttattctaaaaatgtttttattgctgtattatccttattttgctgttggccaattggattaatactgaattggacaaccggaaaacgtacactacaagaaagaatcatgtttacagttttgatattattgatacaggtaagtctatatttcttttgggtatggtacacaaaaatgcagataaataatgctgtagattctgtaaatgaatatttcaatcagttatataattttgggatataaatatgattaattcgctaaaagcgttttaataaaatacaaaggaggagcatacgaatatgaaaaaagatgcaacggaatatgggaaggatttaggggcaggaatcaaagaaagtttaaagggaataaatacagtagcaagtccaaaaaggaaaaaagtagttattaaacttatgttaataccatttatcgctattccactagctttaattggaggtatgacgaaaagtgattttattataggattatcacttgttcctattttgtgttctggattatatcaattttacattggaaatttcaaaaagggacttttatttacatttaccattggcctatgttatattggtgtactaattgacttgttcaaattaaaaataaccggcacccttacggattcaaatagttttcctataatctattaattaaacctatgtcttggcatgggacaccaccttgataatataatatacttaccctgggaaccgatggggcgctattctagccaccgactcttaagagaaaggggctggtgcttatgtacgttacttttaatgacttatttacatttgttatcatgctcgtagcagtcataactcttgttaagcataaaaaataacgccctcgctctggtaaagtaaggcgttattttttacatataccggggtggctaggtatcagctagtcatcggttctcttgttaagtatattatattgcatagccaaacatttgtcaaacagaactgtaccatgacaataatatacttacccgggcagccggtagggcggctgtgcacccgttccgagttttgcggaaaggggaatgcttatgagtacatatgaggaatttcagataatcctgaccgtagcgttattggttgttgctattctgaatttgaaaaataagtagagccgctctgtccctggaaagataagcggctctacttagatacgtttaatcgccggagcgggaagtcttaaccttccttatcggctgtcttgttaagtatattatatatcaaacacagaaaattttcaacaacaaaattaaccggcccctgcgccaacaggaaccggcttgcatacccgaagatacgcactataattcgcacctatattgtaccatcttctgggcggctttgcaagatgtttgcggagctgtattttttatacccattttagggaaatcaattgaaggaggaaagagaaatgacaaagaaagccccgaaaaaaaaaaaaggagaactgccatccaaaaatatccgtgtacaattatacttatatacggatgaaaaaggtaaacggcattacaaaagttttgttgctccatcacgtaaaatcgcacaagaaatggctactagatggaaattagatatgaaggataagcccatagagcaatacaacgtaccggaagaggaagaggacgaagatataacagtgagccaagctattgaacgctatttaaacatcaagaaaggcgttttaagcccttctacgattagagggtatgttggtatgcaaaggcagtattttgacggcgtatttgggcgtaaacggctctcagagctatctaatccatctgtacagatatgggtaagtgatttggcaggaaaacaactgtctcccaagacagttagaaatgtctatggactgttatccgcatcattggaaatgtttgcgccggatttaaccttaaaggtcaaacttccacagaaaaagcgcccagatttgtactgccccaatgacaatgatatcaaaaagctgttagacgctatcaaaggtacagatttagagatagccgtgttactggctgcgtttgggccactcagacgtggagagataagcgcccttactgataaaaatgtagagggtcgtattatccatgtaagagacaatatggtcaagggaccagacaatcaatggtatatcaaacagccaaagacggatgacagcacccgggatatagaaatgccggcatttgtaattgaacggatatccggcaaaaggggaaaactggttgacatgaatccagattatatcacacatagatttggacgggtgcttaaaaagattgatgtaccgcatttccgctttcacgacctccggcattatgctgcatccattatgcacgccataggtgtaccagaccaatatatattgcagcgaggaggatgggccagtgacaatatcatgaaaactgtatacagaaatgtgattgacttggaatctgtccggcaaaataaaaaaatcaataaacactttgaaaagttcatcatgtgatagaatagcatattttccgtgttgcatcgtgttgcatatatcctaaatattataataacttcctccgtgacagacggaggaagtgctattcaaaaacatgaaaaaaccttgcaaatacgttattttctacgtatctacaaggttattaggaaatggagcatacgggattcgaacccgtgacctccacactgccagtgtggcgcgctcccagctgcgctaatgccccgacactcgtagataataccataaatccgcaggaaaatcaagtactatttttccaattattcatacttattgaaaattcgtaaataaaaactcatctttcccacgtttaatccttaaggaattttattcttaatttagctcctgctcaaacttttgtcacaatttccatgtatactcttatccataacaaggaattactccttttgatatagatttctctcatacttagccggcatggttccttcgtgccggctcctctcatattcagacatttgccacttatctttcacctgaaacatccaaagaatactgttttttccctttatccccttattaacggcattttcacacattttctctgccagcatattatacgttagaagccagacaagcttctataaataaatctggaaaggatgtgtattatatggcttatccaaaagttcatattgtcaactctacgaatttcagtgtgaaagggaaggtgaaatatgcctctgccttttgttctgatgataactatgagatagctccatgggggagctggaccgctggcagccgaggggtctgccttcttacagaagtgtcggctactgtccacaccccaggccaggatgccaaagcaactccctatgaatcttccggaacatcctacagtcaatttgccgtactgcagacagctcccggaaaattcaccatgacccgtattgtgacctaagtcaaatgccggcgcggcccacgccgtgccggcccccaattatctgctgtaaatacaaagatgatgttgtactgtttcttctgccatcaataacaataactgtgatatctggtcctcagatattctcccctgccctgtctgcctcctgactgccagaccacattgcccggcaggatgctcccattttccagaagccactttgcattggcccaattgcttgctgtgggctcgcggtaataatttccgtctctggtgcaggagtactgccctggtgcaaataccacgcctttgatggtgttgggaaaccggccatgattcacccggttcaacaccactgagcccaccaaaagctgctcatcatccggacagttctgcgcctctccgcagattacatgagccagaatataaaggtcctcttctgaataagaagggcgccgtatctcaatgcctgagagatattttgtttctatatatgcatgtcctgcctctgttgttatcatggaccaatcaccgtattcacccaaaacctcaaaggatgtgttcagaaatgcctggtccaaaaccactgcccctgtgctgggttccttataaatattgattccatcctggttagcaaacttaattgtcttatgggctgcctcctgaagagcggttttgaattcacccgccacactcttggcggcgagtaccatatctgtcccgttttcctctgcctgcactgtcatgggcactgccagtgataaggtcagagccatggcccccaatataacgattcgtttcatatttactccttaaaatgtttgaactgcttgagccggttacttgccaactgcccatggtaatggttctctattatattctgtcccaaaattagcaatccaaacatatttaaggtaatgaatggaaaaaaggccgccactatgtgacggcccggcctattcgcgtatcagccaccggcctgcttcccgcaataatatatcccttttgttctccatgactccttctaccacctggtccgccagcttagacagggtgcttccaatggagcttcccggtgtataaccaatctgtatcaaatcacttccattaatatccaaatccttaatgcgaaactgcccggtctgctccaccacctcatccagaagggcttccaaacggtggattctggccagccgttctgccagacaggcaggattctggccgcttacatcacaccggcgtacctccagcagccgccggaactgtttttctcccagacggtccagccatgtcctgatgcttcgtctcttttcgtgaaggtcagagtcgtggtatcttaccagctctaccaccgtatcaatggtttcttcatcgaatttcagccgtttcattacctgattcgtaatcctggcgcttacagggccatgtccatagaaatgccctctgccgtcctcatcctcagtatagcattccggttttccgatatcatgaaacagtatggtcaatgccacaacaggatcatctcctgccgctctgagggccgctgcggtatgctgccacacatcgtagacatgataaggattattctgttgaaacccgcacatggtctttaattcgggaaccacagtaaacaggatatgctgccagttgtccatttccaggttctggccttgtgtaaactcccatcctcttaattccaattcctttataatgcaggtcgcggatattggtatatcatgattacaattcaccttttaccaccctctcatttacactggctgcaaagtcattgatcttcctgatatccggttcttccggcagcgatgtgttcttccgggcataatccagacgcttttcatattcatctaccatctcaaaaaattccggaacaggctgccggttctcatccagataccggccatttctgatatccataagaaggtcgtgttccttttcacggtaagtcacaatctgttccttttccagaatatccaggcacatcatgtacaggcggatcagatgcatcatatgcttacccagtttaccatgctctatggcattctggtttctctttcccaccttggcatatgattttacaatgctctgcatctctgaccacaggcatttataatccctgagcggataatgcctcagggtaatgtccataaatatctcactatcatattcttccttaagagcttttccaatatacagcttaacactgtccccgggcatataaaaataccggttcttccagtcaaaggaagcatgttctatggttttcagtatatgtctctcattatccgtctgttccacaagccgggccgccttgttatccagtctgcgcagctgctggtttgcatatcctccaaaggaataaaccgctctctgggataagaataagtgggcatggtctaacagctccctgcccactggtgctatatgcaaataatggtcttctctgccgcccagcatttctatggtatttggattacaattggtcagcagtggaatcagcttgcggaatgcatagatagtggtatcggtgtgcggatccgttacctgcccaaaatcctcatgaatcagaatttccctcttgctgttcagggcacatccgcgaatatccagatcgctggtttccatgctggttccataggcatggcttcctcccaatgtcaataggatgatgtgatggcccaggtgttcatccgttcttaagaaatcatattcactggactgcagcctttcttttatttgtcctaaggtcatacaatactcctttttcagtatcatttatgccattatagcaggactggtggatgaaagcaaaccaattaggacctgtttgcaaaagatatgtgcacacaggtaagaattatttagaaatttgattatggttaaaagcgaaacgagtacccgcaccggcacccaatctctcctgtattataaagctcgcccttcaggcgctttatatgagccttttttccacatagcggacatacaaaatccgcctccccatacccaccggtgctctgcaatgcctgcagggatgcccttatgaaacaatataaattttcaatggtcatctcctgttctatgttgattccgcaacactcctccattcgtatacctcctgcctgttttatcatgatgccggggatttgcttaaccctcattggctcctgcggcagctgccggcctgcggtgccatgccctgcggtgccatgccctacggcgcattcaccttcaaaatccgcgcctcagtaataccctctttgagaatactgctacgtaaatgcatgctgtaatcctgacggcagcggcgcagattcctttgaaaaatccaggaaggacacgctgtaaaacccgttctcttccccgtctgcggcctgggccttatgccagatatccagcgccttctgaaccgttatttctatatcatgataataatagaggttagcgctggtatgggtcacaacgtccgcaatcaaaagtctggcatcatggttctcaaataaaacttcattcagattgtcctttgtgattttcatgtggctgcctcctgtcttatataggtttttataagttccggcctggtagactcaacagactctgtatagtgagtttatcttcttgaatccgccgaaaagaacatatgttcttttatatattatatgatatcacaaacatatgttcgtgtcaagacataatacagcactcatcgcttgcaggaatgtcccagttaaaccatgaatcaatcatacatggccaaccatgcacatatattgtaaaaacatatcataagaggcttttatgcaaaccataacccagcatattctgacagaccagatggattaccaggacaccgttgtgcttaactgccagattcgttacccacaattgaacgcttcctgcaatcaggaagcgatacaggccataaaccaatactatgtcacacaggcaaatgaaaaagcaaggtactgccgcagcgtattatatccccaggcggccgaggaggcaaattacagccgcgtccgcaatgttccattttttccatatgaatttaatataagctatgtggtgacatataaccaggactgtattttcagtcttttttcggaacagtatacctttacaggcggagctcacggatccaccctgcggacctctgagacctgggatgcccaatccggcagaaaaatgacgctcagcgacttttatcaaaacaatccgtcttatatccaggatatccagaattggatacagtttgagattgcagagaggctgaaagccaatcccggtacctattttgacaactaccaggaactcctgcgcaattccttccatccggagaatttttatttgacaccaggcgggatcgtcatttactaccaacagtatgatattgccccttattccagcggcataccggaattcctgctgccctttgatgcagacacttctaatgtataacgaatccctcatcatccaaatgggagtaccgccatgatgacgatacccccattttttggttttccctgtatttcccttatctgcctttctgactctcacaggtcccgcgttctctgccccgctgcggctgcatctgaccctatttcatcagcaggcaaggctcccgctgaatccggcacctctctaactgctcacagcttcaaatctcatacgctgtctgatttccggatactttgccctgtccacctcagaaaaaaacatttcagccggcctggcaaaggttccaaactccccgtacagagcctgatagataaccaggagctctcctgtctccgtatgatgggccatgtccctgaccacatagagatatcggttcgtctttttttcctccgccgataatgtttccctcttaaaatgtctgacaattgtgccaggtccgattcccgtgtgttcattctgtctgttcatccttattcccctgtcctgtattattttgttctccctttggattaaataccataccggaagctgcccgttcatgcaaggacttatctctttttactgcaatctcctgtcaaatcatagctttcacctatcatccgtttgatatcctcatccgggacacttccatccaaaaccaccgtattccagtgctttttattcaaatgataccctggccgcacaccggaataggccttgcgccaaaattcaatccattcaggcgcacatttcagattaatgcagacctgtccctcccgccggtatatccaggcaaatacccgcttattgccccggtggcgtatgacagtccattcatggtccctgaaaggatagtcctcatatacatctttataggtaagacaatatgtaattaaatcgctctttgtctccatccgccctcactcctttatcaatcacaccatggttatatccattctccgcttcatcccccaaaacagacagttcctcatggagccagctttataatcctagattataccagatttaactccataaaaccatcccgtaaaacacagttcggttaatgtgcagatgatgttatggaatcatgcctgagacagcatccgaaataacgtttgaaataatacctgcataaagccatggagcgtgccggaggactgtttcctccgtctccacgctccaggccgcattttttgcttaataccaccgcaccatgggcagttcattgtttacacccttgctcaccagtatctgatgaaggtcaatgactccattgtggaatgttgccgcgcaggagcataaatacaaatcccacatgcggacaaattcctcgtcgaacatgtcctttatttccttttcatgttccttgaaattcttttcccagcacagcaatgtcttgttgtaatggtttctcaggttctccacatccaaaatatgaaagtcatgttccgccatcagggatatgatttccctgagactggggatgaccccgcccggaaatatatatttctttatccatggatcccctgcgtgctccttctggctgctgataaaatggagcaggaatacgccgcccggattcagcaccttgtccacacagtccataaacctgccgtaattttcccttcccacatgctccaccatgcccacgctgaccacacggtcaaatttcatgccgctttggggtaaatccctgtagtccatgagccggacatccagcagatgttccagcccttcctcctcaatgcgctttttaaagccgtcatactgctccgtactgagggtaatgccggttccccttgctccgtattccctggccgccctgattaagagaaatccccatccgcagcccacatccagaaggctcatgccctcttccagcgccagcttcttcagaatataatctgttttattcacctgggcctcatagagggtatcattttctgtcttaaaataaccgcaggagtagttcatggtttcgtccagccaaagcctgtaaaaatcattgccgatatcgtagtgggaggacacctccatcttctggttttttctggaattagagggatgaaggagctttctcagatgcaggcggttgacggaaaaacggtccatctgccccaggaaatggtccagggcctcatacagactcccctccacctccagcttgcccttcatataggcttctcccaaggccagggaggtgctgtccatcagcttcttcaccggtatggtttccctgatgtcaacagcaaacatagggttgccgtgacctacccggtcttcgtgatccttccattttaccagaaagggataatcggtaaatcggttcagaaattgaaccattgccttctcttctaacatactggtatcacacatcctttcttccagtattatccccttctggaaatagaatattcgcagcacggtccaaactgttgcaaatacacacataaaaccccggagagcctaatccctccggggtccatcatttataacatattcaaatctgacgtaagattagtcgttgccgtacagtgtaaccagcttctctaagtaagcgtaacgctccttagcttctgcctcgttacgtgcgaacagctcggctgctctctcaggattcttcatagccagggacatgtaacgaacctcgccctttaagaagtcctgataggtctcaagcttaggagccttggaatccagggagaacttcttctcagctgccgggttgtaacggaagttgttccagtaaccgcactctacagccagcttctcctctgtctgagccttgtccatacccttcttgataccatggttgatacatggagcgtatgcaataatcagggatggtcccggataagcctctgcctctgcaattgccttaacagtctgagccatatcagcgcccatacaaatctgtgcaacatacacatagccatagctcatggcaatgcttgcaaggtctttcttcttaacgtccttgccgcctgcagcgaactgtgcaacagcacctgtcttggtagccttggaggactggccgcctgtattggagtaaacctcggtatcgtataccatgatgttgatgtccttaccggatgccagcacgtggtctacaccgccgaagccgatatcgtaagcccatccgtcaccgccgaatacccactgtgacttcttagccaggaaatctttattcttaacaatgtctctgcagacatcgcagtcaacgccgtccagaactgcaaccagcttatcggtagcagtgccgttcagagcgccggtgccaaatgtatcaagccactccttgcaggctgccttcatctcgtcagtagccttctcgttagccattacgctctcaaccttagcctttaagccgtctctgattgcgttctgagccagcagcataccgtaaccaaactcagcgttatcctcaaacagggagttgtcccatgcaggaccctgtcccttggcatttacggtgtaaggtgtggatggtgaggagttgccccagatggaggaacatcctgttgcgttggcaatgtacattctgtcgccaaacagctgggtaatcagttttgcataaggagtctcgccgcatcctgcgcaagcgccggagaattcaagcagaggctgtctgaactggctgcccttaacggtgttctctttgaacttagccagaacctcttccttaacaggcagggactgaccaaagtcaaagatagcctgctccccaaggttagcctcaaggctttccataaccagagccttgttgcccttcatgcctgggcatacatttgcacaggaaccgcatccggtacaatccagagcggaaacagagatggcaaacttatagccggccatgcctgtcatatccttcatcttcatgtctgcaggtgcctttgcagcctcgtcagcagtcatggcaaccggacggataacagcgtgaggacatacatatgcacagaagttacactggatacagttgtccggattccatacaggaaccttaacagcgataccgcgcttctcatatgcggaggaaccggatggtgtggaaccatctgcatactctgtaaatgcggatacaggcagggagtttccttcctgagcacttacctttgtctggatattgttaacgaagtcaactacatcctttcttccctgggttacaactgcatagtcaaggccttcgtcttcacagttcttccagctctccggaacctctaccttgtgcatgcccttagcgcctgcgtcgatagctgcccagttcttctgaacaacgtcctctcccttacggccataggttgcctttgcagcagccttcattaactcgtttgccttctcagcaggaatgatgccggtcagctcaaagaatgcggactgaaggatggtgttgatacgtgttgggcccatgcctgtctcaataccaatctttacaccgtcgatggtgtagaagttgatgttgtggtcagcgatgaacttcttaacctgtccaggaagatgcttctcaagtccttccatatcccatgggcagtttaacaggaatgtaccgccgtcaaccagctcctgaaccatgttgtacttgcgtacatatgcaggattgtggcaggcaacgaaattagctgtacggattaaataggtagacttgattgggctgtgtccgaaacgcaggtgggacatggtaacgccgcctgatttcttggagtcataatcaaagtatgcctgtgcatacatgtctgtattgtcaccgatgatcttgatggagttcttgtttgcaccaactgtaccgtcagcgcccagaccccagaacttacagtttgtggttccctcaggagtagtaactaaaggagcgccaatctctaaggacaggtttgtaacgtcatccacgatacctacggtaaatggagacttggttgtattctcgtaaactgccacgatctgagcaggtgtggtatccttggaacctaagccgtaacgtccggttaaaaccttaacctggtcaaacttacttcccttaagggcagcaacaacatccaggtacagaggctcgccgatagcgcctggctcttttgttctgtctaatacggagataaccttaacggtatcaggaatggcgtcaatcagggcctgtacgcagaatggcctgtacagacgaaccttaacaacaccaaccttctgtccctgcttcaccatgtagtcgatggtctcttcgatggtgtcattgacagagcccatggagatgatgatgtgctcagcatcagcagcgccgtagtagttgaacagcttatagtcagtaccaatcttggcattaaccttgtccatatattcctgaacaattgcaggaagagcgtcatagtatgggttgcaggcttctcttgcctggaagaagatatcagggttctgagcagagcctctctggcatggatgatttggattcagtgcatgcttgcggaaagcatctacagcgtccatgtcaaccatttccttaaggtcctcataatcccaggtctcaatcttctgaatctcatgggatgtacggaaaccgtcgaagaagttgatgaatggaaccttgcccttgatggatgccatatgtgcaacaactgtcaggtccattacttcctgtacactggactcgcacagcatagcgcatccggtctgacggcatgcgtaaacgtcggaatggtcaccgaaaatagataatgcatggctagcaagagcacgtgcggatacgttgaatacacctggaagctgctcgcccgcgattttataaagattagggatcatcagtaacagaccctgtgacgctgtgtaggtggtggtcagagcacctgctgccagagaaccgtgtacagcacctgctgcacctgcctcagactgcatctctgtaatctgtacttcacgaccgaagatattggttcttccgtctgttgcccattcgtctgtggcttcagccataggtgaggatggggtaatcggatagatagccgctacatcagtaaatgcgtatgacgcatgcgctgctgcatggttgccatccatggttttcatttttcttgccattttgatttcctcctacaaatagtgaatatgtaatggtatacatgtgagtctgccccggacccgggcatgtacaaacatgcttcgaccctatgcagactgacctgtctactattatagcaattatttaacaaattgcaaatgcttaatcgtaattacgccaaaaaatacaatgtcaatttttgaaaacatagaaagcgccgcaaaaaaagagaaaccattgatgccggtttctcttttcctgtctgcttttttattctggtttcagcggtgcaatcaccggattatctccgccaggtccggctgcctcagtctcagacggctgcggggcctgtgttggattcggtgccgctgcaggcgctgtggtgggcgctgccggctgggtcactgtgccgggaccgctctccggggagccgtttccggaaggcgcggtgattgtctcatcacccggaatatagccgtccggcattccgtcaatggttggcgttgttgtctctgtggaaagggtggtctcctcaggcggcagcaccacgcccgtggtgttgcggcggataacgggggcatggcctttgtatgtggtcttatggtcctgttccctggaaacctcttttccgtccttatataataccttgtaggtgatccatctgcttcccttgctgccggcgctcttctgaatctccactcccggctcaagggtctggtcctcttcatatgtaggtgccggcggatccagctcctccactttctcggataccaaatccagctttgttccctcctccagaatcggaataccgtaaatggataccgtcatcttctggtccgcgtagctggccttgatgccgatggatgtgctggatgtgttcttgaaacggaaatccggctgttcccagctcaccgtggcgtcctggcccggtgtgatatagttgggctcaaaggtgtgggagcgcctgaaggtaatgctctcctctcccagtccggacctgtatactgcgttgtacagggtggtggatacctggcatacacctccgccaatctcctgcaccacctctccgttgttataggcggctgctccctggtagccctttgcctctgtcctctgtcccacggctgcgttaaaggagaattcctctcccggatgcaccacggttccgttcagagcctctgaagccagcctgatattggtatttcgggccttgttggctgttgtctttgtggtgaaggtgctgatggtcttatatttttccttggcagcggcagcgctgatatccggggctgtctcacttcccgtggctgtgatggaagcgtcaaacttcttatctttcagggcctttaatatgtctgctgccagcttttcctggtcaatggcaaacccactctcttccccggcgaacacaaaggcgcccttttccttgtcatagctgtcgatggaaccgtttttggcctttttattccatttggccgcgcagttttccgcctcccccgcagctgcctcttccagtccgtccatgttcagtgtgtaactctcagccggttccccgctgtagatttcatccagcagcgcgtctaccttttccgccgcaagattcgtcacattatatgtatctccgtcataggtaactgtcatatcccagggatattccttaagaattgcattcctggcctggtttttggacatgccggtgatggtgatcccatccaccttgacttccttcatcatctctgtctcggttgtctcttccacagaatgatccggttcgcttccaccggctcctttccatttcatggccagcgatatgccggctatgaggataataagaataactccggctatggcaatctttttataatccggccccttctttctcctgtgagggctgttgcgcctggctgtctgggccgcgttcatcctgccggcctgtccgccggaacgataggaataagaacttcttgaaccgctgcctgacgaactgcttctgcctgtattcctggacgttccccgtcccgtacctttatctgaacccctgccgcggcttctgcctgctgaggaacttcttctgttctgattattctctaactgattcattctattcacctgtcatctctgcctatggatttattcacaagttgtagtataacatactttatgtaaaatggaaccgtcttttttgtttttttcaggccaattttacttattgtgaatttcatgttactatatataaagtaagtattattaaattattaaaaatcaattacaagccttttcaaggtctttacatcttacgattcggaggtcacatcatgtcttacgttgatttacatgtccactcaaatgcatccgacggcaccctgtcacctgagcaggtggtccgcctggcccatgaggccggactttcagccatcgcccttacggaccacgataccacggccggcgttgccggcgccgcggaggccggggcagaactggggctggaggtggtgcccggcatcgaggtgtccagcagtttcagggaccacgaaatccatatactgggacttttcgtggacactgattcgccctcccttcaggctgcgttaaaggaattccgccatcacagagaccagcgcaaccaggagatgctggggcgttttgatgcccacggcatccacctgaccgccgaagatttatgcgccgggaaccctgatacggtcatcaccagggcccatgtggcaagagcccttctggcaaagggtctggggcctgatttggaccatatttttaagaaatatctgcaatacggaggcacatactgcccgcccaaggaatttttgcctcccgaggcggtcatggaagccctcttggacagccatgcctttgtggccctggcccatcctttccagtacaagctgggggataaggccacggaggagctcatcgcctatctggcaggcctgggcatgaaaggcctggaggtatatcactcctcccacaaccgcctggaaagcgccaagctccaggaaatggccgcgcgccaccatctgctctccacaggcggttccgactttcatggcagcaataaaccagatatttccatagggacgggccggggcggcctgcgggtctcctccctgctgttagatgcgataaaaaacaccctttaatccctgtatttttatgaaaattcataattgcccttcccctgcccttctgctataatcatatatgttaaaaaattaaccagccttttccatttcaggaaaatgcatacaaacacaggaggatatgccatgaagattcagaatatcacagacgtagaaaagtttttctctgtcattgaccagtgcaggggaaccgtggagcttgtatctccggaaggcgaccgcatcaatctgaaatctaaattagcccagtatctgtctatggccaccatcttctccaatggatatatcaaggaattagacctggttgctcatgagaaggaagacatcgagcgtttaatcaaatatatgtatcagggagaataagcctaagataaaagcctggaataacagccgggaatacagacaaaggcaaagcccggaaccatctgacaggttccgggcttttttggtatctcttttttattatctctgttttgttatctctgttttgttatctctgttttgtagtattcacccaatgattctctcgtatcatttccggtctttactcctgctgcccctggtccccgtctttctcaccagccggtccgcaggcatcctcacagacagctgttcctccgcctttctttcccaggcgggtattgaccccgtcccgtaaaagggcatacagcacggaacacagcggaatgaatatgagcattcccacaatccccatcatgctaccgcccacggtcacggccaccagcacccatatggaaggaagccccaccgaatttcccaccacataaggatatatgaggtttccctctatctgctgcagtacaaagaaggtaatcgtaaaaatcagtgcatccatgggatttaccatgagcatcaaaaacacgcccactgccagtcccacaaacgctccgaaaataggaatcagggctgtaaatgcaatcagcaccccaatcagcagtgcatagggcaggcgtataacggtcagtaccacaaaaaacatggttcccagaatcacggcctccgcgcactgtcctgtgagaaaatgggagaaggtacgctctgtaagggctgtgatatccaggatccgccctaccgccggttccggcaaaaaggcctccagcaccttctttatctgccgtcccagtgtctctttctgcaaaagtatatagatggcaaagataaatccaatgaggaatgaggatacgccgctgacaatggagacagctgccgaaaaagtggtgttaagcatagttcctgctccgctctttaaaaacgcaaccatgttctggaacacttcctgccagttcacttccatctggttcatatattccaatatctggggattactggcaaatatacgctccgcctcatcgcgcacccctgcaaagaataccgggatactgctttgaagattcataaaggtctttaccagctgaggcgccaccacaaagatgaccagaaacagaccgcctgtaaccaggaggatggtcaccaccaggctgacaggccgtctcagcctgctgccctgcccaaacacggtcaaatgcctctcgatattgcgcatgggcacgttcagtatgaacgctatggctgcccccagaataaagggccagacaatatgcatcaatccggccgccacatccaccagacgtctgtaattgattcctgcaaccacaattaccacggtaaaaacgataagtcctctgatttttttcattgtatcgctgtttaattccatcgtaccatcctttatagttctgtctcttccaggaacgctgcctcaatggcttcccgcgctgcccggaaggtgccctgggccatgaggctgctgcctccgccccttccgctcagacggctgttcatggctttgctgagcgcgcgcatgtccatccggctgctgccaagagcatagtgatattcgctgtccctgtcattcccggaacacacagcagccaccccggccttgttctgttcatagagaagggtcgcatactggcggacctgaatcggagttaaatcctcctcaaatacaatgaggggctctgtgctctccgggaactgtcccgccttcagggccagcaggctgctgcccagcttcccaatcaggtaatccttgtcctggctgtcacttttaagcttttccactgcatccggcacctggacgagcttggctgacagcaggttggatatcctggcttcatccttcagcctgtccctgtaatccaggagagccctgcgtccgcacagcatggacagtcgaacgccgcccttgtaatgaatcatgcttcttatcttaatgatgcccacttctccggtgttttctacatgtgtgccgcagcatgcgcatacatctgcgccaggcacctccacaatgcgcaccaaaccggacagttctttcttgcttctgtactccatggtcctgagttcatcctcagagggatagagcacctttacagggacattggcatagaccagctgattggcctcatcctccagccaatccagatcctccggctcaatgatgccgttaaagtccaccgtcacttcctcagcccccatgtgaaagcccacgttatcatatccaaagtgtttgtgcaccagaccggacagtatatgctccccggtgtgcagctgcatgttgtcataccgcctctgccagtctatgattccctccgccagggtcccctcctctatgggctgcgccagttcatggattacctgttcccccttctcatggacggataccacggaaatcccgtttaaggttcctgtatcatagggctgtccccctccttcaggataaaaaccggtctggttcagagtcaccagccaggttcctttcccgctctcctcacagtgctccactgtgcacatgaacgattttacataagggatctggtaatataatctgcttttgtccattcttaaagcctcttttctttttcatctgccggagcgtattcttccttctattatcagaaaacgttccgcgcagtatcgtgtctgccgacattatactatataacccagccttgtaccaacaaaaattttctaaattttatcaaattgtggaaacatgagcaagcagggcttcatatgatacagtgtaattaaactttatatggaggaattaacatgagtgatgtagcagcaacaaactgcggttgtgactgtggatgcggatgtggaacaggaggcagcggatgcggatgtaatatcatctggcttatcctgattctgtgctgctgtggaggcggcggtggcttcggacatagcgactgcggtggcggttgtggctgtgggtgcagctgtggaggcggatgcggagatatgatttggctcatcttaatcctgtgctgctgtggcggcggtggcggcggcttctgctgctaattcccacctctaagaaatccttcaccaaagaatcaaaggaacagggagtgcttcatcactccctgttttttcttgcagggaagccgggcttatttgccggcctcacctgtctctccggatgaaaaagcacttttcgtcccccggttcttacctccatacccctttcttccctgtctctgctttaagcattcctcatctatttcatatactgcatttccatctataatcaaacggctgtacatggatttcactctccttccatacttataatatatgcagtgtccaggctttggctcattatgccggaaaataagtggcatgtaacaggctcctcccgcataaattggaagcaaagaaagaaaaggctggtggaaatacatgaatccatctgatgactataaactaaccgacctggactatctcataggcgaccaccatctgcagatgattaaggcctccctgccctacctgggcgttcccgaacaaaaggccatctccctgtttgtcaaggtccaggaactgcgaaagacagtggagctatttgagactgaagaggtggcatccatgggcatctgctccctggaacgtccccagggaaacggctccatgcgcgatttgttaaaggccattcgtccatatgggaatcccatggagcaggatatgattgacatggccgaaaccctgatggaaggccagactcccatggaccagctgcgcaggttcctgacaccggagcagcaatcgcgttttgagaccatggaaatgatattcactgccatgcaggccatggcctgatacggccattcactgaatcccttaacagaaaggactacataattatggataacagctggaaacaagaccccaggctcaaggccatgaacaaagataaactggccatgctcaccgaatttgcggagcggattgaacattcagacaaaaacaacatgatggaggcattcatggctatcaacatggaagcccggcaaaagggcgtacagtttaacgaccgggagacagaccttctggtcaacatcctcagttccaggatgcctccctcagagaaaaagaaaattgatttattaaaaatgctttcaaaaaaaatggcagggccgcgctgatagcgccccctgcctctgccttatggaattgttttaatagaattattttatggaattagtttaaccgctccaaatccggcgcaatcacaatcttagtgtgctctgtggctgactgcaccagctccttggcccgttcctggggcaggcggatacagcccgcggatccgttatccctggcagcggtaaagcagtgaagaaagatggcagagcccttcccgggctcgcatgcttcattgtaattcaatgccagggcgtaattgtagtacggggacgctgccgccatattctctgcggagttccaggtctttgcaacctgcgatgtattgaccagcttgttataatagggactggctgaatcatccacccagtagtcgccttttgtgatcttatggtatggcaggacgctgcccggattttccctgagcccaaaagccatggtaaatccatatgtaccggagggcgtgctgccgtccccctctgtcttctggtccgtaattccgttccttcctacgatgcctgcttccttccagaccatctcccaggcttcacctgacttcttataataatatacatctgcgctacagccgccggttcccactaccaccaccagctggtccgcatcctttgctccttccagattctggggctgtatgaccccattctccactgcagccttcttttcctcaggctctgcttttgaagcagcaggtacccccggcccctgttctgccggattcacggctgtccctgcagctgtccccgcgcctgcactgccggcagccatggccgtaataccgcccgctgccattatggctcctgacagaacaaacgctgccgctgccctgcctattttatgacacttcccattcatttccatcgttcttctttcatgtctcatggccgtcacctcgatatcctgttttgtccatttcctattataacctgctatagcaggaaatgttatttcttttttcttacatttcccggtatgaacacggctccaaagcccagcgcaaaaatgcctgcccagcccatgtgctgcaggctgcgcaggcattttgtcttcccgcttatatgcgggaatctgatttatttacatgcaatattgacaatctttccaggcacgtagatctcctttaccacattgcctgtcagcttttccttcacagcttcccgtcccgcggcaatggcatcttccttggagctgtctgcgctgatgctgataacggcccgtgtctttccgttaatctggacagccacctcgatctcatcgtccttcatggcctcctcatcgcattccggccactgtgcatggaacacgctgtcgtcaccgcctaactgctgccacagctcctctccgatatggggagcaaagggtgccagaagaatcacgaaggtcttaagggtctccctgtcgattccgccttccttcctggccagctcaatcagcttattgttgtactccatgaaaccggaaataacagtattgaggctgaactggttgaagcggtattcaatgtcatataccagcttatggcgcagctttatcatttctttggacgccttcacatccttatccttgttgtccatcaccaggttccagaaacggttcaggaaacgtgatacgccctcgatgccccggtcatcccactctgcgtccagctccggcggtcccacgaacagctcgtaaagccttaaggagtcgcagccgtaatccctcaccaaatcatcgggagaaaccacattgcccttggatttactcatcttaatgccgttctttccggtaatcataccctggttgaacagcttcttgaaaggctcatcaaaatcaatagcgccgatatcacacaggaacttggtgtagaaacgtgagtacagcagatggagcaccgcgtgttccacgccgccgatatacatatccaccggaagatacttgtccgccttttccctggataccagctcttccttgttgtggctgtccacatagcgcaggaagtaccaggaggaaccggcccactggggcatggtgtttgtctctctcttggcaggagcgccgcagacagggcaggtggtgttgacccattcgtcaatggcagccagaggtgactcgccggttcctgtgggctggtagctctccacctcaggaagctttaagggcagctggtcctcaggcacaggcacacagccgcacttgggacaatggatgatggggataggctcgccccagtaacgctggcgtgagaatacccagtctctcagcttgtagttgaccgtcttatggccaaagcccttttcctctatcatgtgaggcgcttcctttttaagaacagcggactccaggccgttccaatcaccggaattaatcatgatgccgttggcctcggtatacgcctcggtcatgttctcaatttccttgccgtcctttgcgattacctgtacaatgggaaggccgaacttcctggcaaactcaaagtccctgtcgtcatgggcaggcacgcacatgatggcgccggtaccgtaatcagccagtacataatcagacagccagataggcgtctttgcaccgtttaacggattaactgcatagcttccggtaaacacgccggtcttttccttggcctgcatacggtccacattggaacgcatggaagaatcgaatatatatttttcaacggcctcccttgtctcatcggtggccaggctcttggccagggcatgctccggcgccagcaccatgaaggtggctccgtaaagggtgtccggcctggtggtgtacacggtaatcttctcttcccgcccgtcaatggggaaatccacctctgcgccgtatgacttgccgatccagtcagtctgcatcttcttaaccttctcaggccagtccagcttatccagatcatttaacagacgctctgcgtaagcagtaattttaagcatccactggcgcagattcttcttggtaactgtggtgccgcagcgctcgcagcatccgttgaccacttcctcgtttgccagtccggtcttacaggaaggacaccagttaatggggaattccttctcataagccaggcccttcttaaacatctggacaaagatccactgggtccatttataaaagtccgggtccgtggtgtttacttccatatcccagtcataaattgccgcaatctgtttgatctggcgcttgatattcctgatgttcgcctctgtggacttagccgggtgcacgcccatcttgatagcgtagttctcagccggaagaccgaaggcatcccatcccatgggatgaatgacatacttgccctttaacagctgatacctgctccagacatctgaaatcacatatcctctccagtgtcctacgtgaaggccgctgcctgaggggtatgggaacatatccagacagtaatacttttccttcctgccatcgtttacattgatgggcttctcttcccagttctcacgccactttttctcaatggcgctgtggttgtactgtgttgccataatctcattcctccattggttatctaaggggatgattcccctttatccagacagcatacctgctgcgtgcagttttctgtgaaacaaaaaagcctgcgcctctattgctagagacgcaaggcttaaaaatccccgcgcggtaccactctggttcatgctgtctgacgcatgcacttaatcctcttataacggtaaggtctccgtcctgacctactggttcccggtcccccgtttccggcggcccttcctcgttgggacaggctactccagggccagttcaacaaccatccgtcaccggctttcaccagccgccggctctctgcatccatccggttatctactcttccctatctgcgtatttgcactgattcttaatttaacatatttcccaaacagtgtcaactgttaccagacaaaaaatcccctgccgcgatctctgaccaggccgccttataggctgtcttggagcgttttgtctccctggaccgtctcaccggtctggctgccctggcccatttggccggcgtctcatggcgtgagggctttgccggtccctgggtcctggcctcatccgtaaacatgacgcagtatccatccaggtccctgatccaccccttctcaaaccatccatactgggtgcccccaaaaccgtataccgcatcctcattcagatacgctgccggctttccgtcaaacaggtagatatgttccccgtcactgtcaatatacgctgccggcgtcccatttctgtcatacaatgtcatacttccattctccccatttatttccattctccgctgctatgtatgcccgcagcggatctattatactactgcgctgtcccggattcaatgagtttcttaacataattctaacggtcccttctcttgcctttccgtttgtccttatgttaagctaaaatatatatgttaacataaataacggacaacaggaggtaatttattgaatcagaagctaaaagaaaaaatcacagaatccttatcatctgtgctgcccgttacctgcattgtattaatccttgggatcaccatcactcccattcccctggacccgctgatgctgtttctggcaggggccgccttccttattataggaatgggattcttcaccctgggagtggatatggctatgatgcccattggagaaaaggtaggtgcgcagctggccaaggcaaaaaagcttccggtcatcgtcattgcatgtgtcatcataggcgccatggtcacagtggccgaaccggacctgcaggtcctggccagacagacaccggcagtgccggacatggtgctcatcctggcagtagctgcaggagtcggtttcttcctggcacttgcatttcttcgctccctcttcggctggagcctttcccacattcttctggtctgctacatcattctcttcatcctggccttctatattccaggtgattttctggctgtagcctttgattccggcggtgtgacaacaggtcctgttacagttccctttatcatggccctgggcgtgggactgtcttccatcggccaggggaaaaacgcggacagcgacagctttggactggtatctctttgttccattggccccattctctctgtcatgatactcggacttttgttccagtcatcttccggcgcctatgagcccatgaccattccatccatcagcaattcccaggacctttggctggccttccagagcgaacttccccactacgcggcggaagtattcacggccctgtttcccatcctggcttttttcctgctcttccagatattcttcctgaagatgcgcaaacgccaggtggtgaaaatcctggtgggaatgctgtattcctacatcgggctgacgctgttccttacaggcgtaaatgtgggctttatgccagccggaagctatctgggaaaacagatggcctccctgccctatcgctggattctggtgcccgtggccatgctcatcggttattacatcgtcaaggcagagcctgccgtacaggtgctgaacaagcaggtagcggatgtgaccggcggaagcatatctgaaaagaccatgatgaccggactttccatcggcatggccctgtcgctgggattctccttattccgggtcatcacgggactgccgctcatggccttcctgctgccgggttacgcccttgccctgggtctctcctttgtggtgcccccggtctttacctccattgcctttgactcaggaggcgttgcctccggtcccatgacagccacctttctccttccgctgtgcatgggggcctgcgaagccctgggaggcaatattctaactgatgcctttggcatcgtggccatggtagccatgacccctctcattatcatccagctcatcggactgtcctttgagcttaaaacccgcagggagaaagctgtttccagacatcctgtggtggatatggaacaggaattcatcaatttagaggaggaaccttatgaaccataaaagtataaagctggcagccgccatcgtaaaccgcggggccgggaacagggcagctgccatattccatacatacaaccatgaaatactgctggctgtcaggggacacggcacagccagctcggcagtcatggactgtctgggactggatgagcctgaaaaggacctggttctgggactttcatccaagaccggcgccgaccgtctgctccgtgcccttggcagggaaatggaattttgcaagcccggacacggcattgctttcaccctttccctcacaggcattagtttcgctgccatggacattttaagccggcacgaagaccaaacagggccaaacagccgcccagcagaacacaaggaggatattcccatgacaaattcccattcctatgaattaattgcttccgtcatccacacagacctgtccgcgcctgttatggaggccgccagaaaggccggctgtcagggcggcaccctgataaaagccagggaaataggcagcgatgccggcaaaaagctgttcggcatgaccctttcccaggaaaaagccatactgctgattctgacccccaccagcttaagggctcccatcctgaagtccatatgcgagaccgtaatgaaggagaccggagaacacgcagtggcaatttccctgcccgtggatgcagtggagggactgaccggctgatgctggcagaaaaaaccgctttctttttgggatgaatcctttataataaatactatcaaaggaaagcaggtgcatcgcaatgtacattggtgatttacatatccattcccgctactccagggccaccagcaaggagcttacgccggagcacctggacttatgggcggggaaaaaaggaattaacattgtaggtacgggtgacttcactcatccggcctggagggcggagctggctgaaaagctggagcccgccgagccgggtctttacatgcttaaaaaggaatattccttacagcgcccgtccatacttggccagagcaggccccgttttgttatcagcggggaaatcagctccatttacaagaaaaacggccgtgtgcgcaaggtacacagccttatcctcctgcccagcctggaagcagccgaagtgctttccaggcggctggaagccatcggcaacatacattcggacggacgccccatcctgggattggactgtcacgatcttttggccataacactggaggcatgcccggatgccatctatgttccggcccacatctggaccccgcatttttcactgttcggggcattttccggttttgataccattgaagagtgctatgaggagctgactccccagattcatgccctggagacaggactgtcctctgatccggccatgaacgggaggctgtcggcccttgactcctttcagctcatctccaactctgacgcccactctcccgccaagctgggcagggaggccagcctgtttgacattcccatgtcctatgcggggctctacggcgccatacagaggggcgagggccttaaaggcaccattgaattctttcctgaggagggcaaatatcattttgacggccaccggaaatgccatctctgcctcagtccctcccaggccaggaaatacaacggcatatgtcctgtctgcggcagaaaactgaccacaggcgtacttcaccggattgaacagctggctgaccgggacgaggatttcctgctgccccagggacgtccctttgaaaacctggtgcccctgggcgaggtcattgcctcctcagtgggttcctccccgtccagcgtaaaggtttccaggcagtacgaacacctgctggaggaactgggcaatgaattttatattcttcgccaggccccgctggaggatatcagccatgcggccggctccctgacagcagagggcatacgccatctgagagacggaaaagtccagtggcggcccggctatgacggcgagtacgggaccatgcggctgttccagtcagccgagcttgacaatgtggagggacagctgtgcatgacctttgagacagcgaacgcggacctgggcgaaaccatgggacctgggagcccgggagccccgggggtgacgggggatgcggagctggcagcagatgcggttccttcggcaaatactgcattgtccggcaaagccggcgtttcccacggctcaacggcttcccgtgaagcttcctatgaaacagccgtatcaaatatcctgactgtttccaatccctcctctgccctgaaccgggaccagcagcaggccgtggaatccgtattcccggtaacagccgtcatagccggtccgggtacaggcaaaacaaagactctggtgtcgcgcatcgaacaccttatgggtgagcggggcgtaaaaccttctgagattacggccgtcacctttacaaacaaggcagcggacgagctgacacagagaatccgccaggcactgccaggcaggcgcagcctgaaccagatgcaggtcggaaccttccattccctctgctaccggctgttagcccggtccggaacagagctgtccctggcagaccagggacaggcggaagaatgcgccggagaaaccatagaagccctggaactcgcctgcaccgtcaggcagtttctcaccgccatctctctgcataaggcagggctgtcctccgcgcagggctttgccgcctatatggccgatgattccgccgcggaaaccggctttatcctgacgcaggaaggggcagaccggtaccagcaggcgctggagtgcaggaagcttatggacttcgacgacctgcttctcaacatgctgcgccttcttgaacaggaacagaaagcagaatacaggaagcagcatttttcttatctgctggtggatgaattccaggatatcagcccggtccagtaccggctcatcaaggcatggaataaaggcgggcgggaactctttgtcatcggtgacccggaccagtccatctacggcttccggggttctgacagccgctgcttcgacctgctggaacaggattttccgggaaccagcaccatacggcttaccaccggctaccgctccaccccggagatactctccgcctcccttcctctcatctcccgcaatccgggcggtgagcgcagactctcagccgcccgtccccacggcggtccggtgcgtctggtgacagcacagaccagcctgtcggagtccatcttcattgccaaagaaatcaaccgcatggtgggcggaatcgacatgctggatgcccacagccagacccccggcctgctggatactgccagaagctttgccgatatcgccgtcctctaccgcaccaatcaccaggcccgcctgctggaacaatgcctgcaaaaagagggaatcccttatgtggtagcgggaagggaggattatctggaccatccggctgtccagggcaccatctcctttttcggggccctgcttaaatcttcggggttagatgaagataccacgaaactctgcagaaaacgcatttccccttccgcagattacagcagcctggcagagcgcttcctgccaagactaaaaagagacaggccctggaaacttctggcggactggatttcatgcctggggctggggtcagacaagtccatggacacctttgtctgcatgtcctatttccacaaaaccatggaggatatgctgagcacactggcctttggacaggcccacgatctgaaacgaagcggtcaggattcccgcccctccgatgcagtgacgcttatgaccctgcatgcttccaagggcctggaatttcccgtggtctttctctatggcttaagacagggaatcctcccccttaaaacaggaaagggagctgtgaatccggaggaggaacgccgccttatgtatgtgggtatgacaagggccagggacgaattaattctcaccacctcagaggaaccttccccattcttagaggagcttcccaaagatgcctgccgccgggaaaaggcccggactcccggcagcgggatgaagcagctgagtctatttgatttcatgtaagatttttaaaaccgggcatttgccgcggtactttccctctcaatacaaaaagacctgacgcacgccatagatggggcatcaggtcttttcacatattcacatatatcaggaaaccggaatggcagtaccgggcatcctatctctcggacataggcacataatccatgttgtcgcctacgtacttggtggccggacgcataatacggccgtcatacagcttattctcaatattatgggccacccagcccacaacgcggctgcacacaaacagaggtgtgtataaatcccttggaatccgcagcataccgtatgcaaacccgctgtagaaatccacattggtgggaagggccttgcccttgatttcctccattacttccttggcaatacgctcaaagcgcatatagaagtccagctccctggtatgcttctgttccttggccacctccatgcagcaggcccttaagacctctgcacggggatcggacaccgtgtagacagcatggccgaaaccgtatacaaggccggaacggtcatagagttcccctgccatcagcttctccactgcctgacggatcttcttatcgtctgcatcatagccgccggtttcagccagcaccgcatccatcatctctgccaccttgatattggcgccgccgtggcgcggtcccttaagggagccgataccgccgcataccgtggaatagatgtctgtgcccgtggatgcaatcaccacattggtaaaggtggagttgttgccgccgccgtgatccgcatgaagcatcagtatggtatccagcagattcgcttccttggaggtgaatttctggtcctttctcagaaggcttaggaaattctcggcaatggaatattccggatttgcataatggatgaacaggctttccctgtcataataatgcaccttgctctgataggcatagcaggcaatggagggcagctttgccaacaggttaacacccttgaccagggtctggtatacatcaatattgtccggatcgtcatcgtaattatacagggtaaggaccgcgtcctgaagcttattcatcagattcttaccgggaaggcgcagcaggttcatttccacgaactcatccggaatggtgtagcagtgtctcaccacattgcagaacttttccagttcagctttcttcggcagatatccgaacagcaaaaggaaacaggtttcctcatacccgaaatggctctccttcttcccctttaccaggtccagtacatccacgccccggtagagaagccgtccgggaatggccttgattcctccgtctgtctcctcatatcccactacgtcggccaccctggtaaggcctatccgcacaccggttccgtcctcattcctgaggcccttctttacattgtactctttataccatttattaggaatatccgtgtaattctgcgacttcccataaaactgtgcaagaaaactctccttaaccatgtacccatgctcctttctcaaatacccccatcagtgtctgcccctgttatagttaatcagacagccggcctttacgatttcccgctcctctgccgtcatatccgcaatatacaaatccagggttcttatgctgctgccctcttttcccagcacataagccttaatatcctttaaatccccgtccagggctttccttacgcccggaacataaatataatctcccacctcgaagcagggatcctcctccatctggaagggaaccatgccccagttcatcacattggagcggtaacgcttggtggcgtattccttacagatattggccaggcctccgatgactctctggcagctggctgcctgttccctggcagatccgtcgccaggttttacagcataaatcatgctgcccacttccgtgtcctgaaccgtcacattctcattgccttcaatgccgcggatggcgtcaaagagcttctccaaaacaggctccagctccacttccttggccgcgccttcctttgttctggctttttccagcttatccacttccttggcccttcccacatactccgggtcccttctggacaaagtgaattctgccagtcccaggggattggaccggtaagatgaagtctcgccggaaggaatcagctcatcggtggtggtcacagggtccatgattttggaacataccttcaggagaatattgtctgccagaggactcatctccggccagtccttgatattcggtccgtagaccagctccttttccccgtcgcctttgttgtaacccatgtatacccggttcttataggaaatgtcgtcaaattcatactcaggcacattgtcccagccctcaagctcccatgcggaggtaagccttcctccgttggctgccgtggctgcaatggaacgcgcgtccatcagggcaaccgcggccatctggccgttgcctggtttggatccttccctgttggggaaatttctggtggtatggcggatactcagaccgttgttgcagggcgtatcgcctgcgccgaagcaggggccgcagaacgcagtccgtataatggcgcctgcgtccatcaggtcggacacagcccccttcttcaccaggtccgcaaagacaggctgagaagacgggtatactgccagggagaactcgtcgcagccgcagttctttccctttaatacacgggcagcttccattacgtttgaataggtgcctcctgcgcagccagcgataactgcctgctgaaccatgagctggcccccctcaatcttatccctcagggtaaaggacgcctttccgcccgataccttggcagcctctgcttccaccatgcccagtatatcgtccaggttggccttaaactcgtcaatctcgtatgtattgctgggatggaagggaagggcaatcatgggctttaccgtggacagatccacgtatacgcagccgtcatagtatgccacatccgcgggagccagttccttataatcttcctccctgtggtgcttggccagataggccctggtgtcactgtccgtcttccatatagatgacaggcaggtggtctctgtggtcatgacgtccacaccattgcggtaatcggttgtcatggaagccacgcccggccccacgaactccatcaccttattctttacatatccgttcttaaacacggctccgatgatagccagggcaatatcctggggaccggttcccggccggggcgcgccgtccagataaacggctacaacgcccggatatgccacatcatatgtatccttaagaagctgcttcaccagctccccgccgccttcacctatggccatggttcccagggctccgtaacgggtatggctgtcggaaccaagtatcattctgccgcatcctgccatcatctccctcatgtactgatgaatgaccgcaatatgcggaggaacatagatgcccccatatttcttagccgcagacaggccgaacatgtggtcatcctcattgatggtccctcccaccgcgcacagagtattgtggcaatttgtcaatacataaggaatcgggaacgtttccatgcccgaagccttggctgtctgtacaatacccacgaaggtgatgtcatgggatgccatgctgtcaaaccgcagcttcagatgttccatgtcgccggatgtgttgtgggcctccagaatggagtaggcaatggtccctttcctggcggatgcctggtcagcatccctgccggtcagtttctttacctttccgctctctgattccggtacgatttcagtgccgttaaccagataaataccgctgtcatacaatgataccatttcattacctcctggtgtctgattttatgaaaaagggctcggcttggatttttgcctgcccccttacattcgttggttattactataaaacaaaaaaattgatttgtccagtatttttattgtagttaccacagcttttaaattgtggttcatgttaagtctgacatatcttttactgtcacatgctaatactttatcgcatcaaagcactcgtgtaaatcaccaatttaatataaacaaaccgcagcatatgacaaaatagacaatcatccccacattcaaaaacgctgtctgaaaagctctcccctttctcaggggccactgtcccggctgaaaggtaatctggcgccggtacataatgataagagtaatggctgcaatgagacaggccagcatgaaaaacagatatgccagtatcatgatggaggaaaacgctgtcaccagccaccccatgtcaactcccaaaatagattcaatctgccggatcatccacggtccctctgccagtccctgggccccctttgacagttccacggtgatgacgccgcccaacaggttgaacagcatatgaaaccctatggtgtatctcaccttccctgtctttgcatacacgtaggcccagagaattcctatgccaaaggcataaaagaactgggaaaaattaccgtgggccatgccgaacataatgccggatatgatgattgccgttttctgtccatatcccagcagccggtccatgaccagcttcctgaaaaaaagctcctccaccacaggggccataatgaccgttgtcagcagattgacccacaggctggaatttctgataagctggtccaattcagcggaatcagggcctgatggctgtaaaagccctaccagcctgcccagaatatttcctgccagcccgattcccactgcaatgacaaagaaggacgcgaatttccagaatccccactgctccttctggggcgccccgcactttggcacaagctggagcagtcctgccaccgccggaaaggccaccaggtacatgggcagggacgacataagcatacgccccgaaaatccatagaaatcaataaaatcacccagcagagaattaagcagctccaccaggaccatgaccactacctgggctgccagggtaagcagcatgaaggccgccgccgccagccccacatgtgagaactgcttcctctggcgcctctccatagcagctgcctgccgcgggtcctgcggcgaatcaggctgcgggctgtgctgcgggtcctgctgcgaatcaggctgggggctgtgctgcgaagcctgcatctgcggggcaggctcccaggcccttccccggttttcattatcgtatatcataggccacatccagtctccttcatcaaacttatcatacatcgcggctttggttctgtatgtcacaccgcactgtatgggaactgtcaaaagacagtccttttttagtgttgcaattgcaacaaaaaagtattatgatattagatatcataccataaaagatagcagggtaaaagaaacatgacagaatattttcagaaaaatctatttaaagacatttccattgatgagtataaaaaactgctctcctgcctggacggaagaacaaaacagtttaaggctggcgagaccatatgcgattacgatgaaggctttcatgaaatcggcatcatcggcaaaggcactgcctccgttgtccgctatgaatacaacggagccagaaccatcctggaacgcctgagtccccaggacatcttcggccatctgctttcctacgagggcagcgaacatgccggtatcagcgttgtctgtgacagcccctgtgacattctcttcatccactacgccaccatcggttctccctgtaccaggtcctgcgcccaccatcaccagctgacccaaaatctgctggacctgatttcggagcgggccttaaacttaagccgcagggtggaggttctgtcccagcgcaccatccgcgaaaagctcatatgttacttcatgcagctggccgctcaagccaaagcctcttccttcagccttccctttaccatggttgacctggccgattacctttccattgaccgcagcgccatgacaagggagctgaaacgaatgaaggaggaagggctgattgagatggacaagcgctgtgtccgcctattcctttaatctgtcttcaaactgccgggcgctcatagggcgcccgaaataatatccctgtatatattccattcccaattcccttacagcctcatactcctctttcgtctccacgccctccaggcataccttcctgcccacatcatggcacaagtcggtgatggatcggataaaggtagcattaaagaggtctgaggtgatccccttcacaaatcccctgtctatcttcaccacatccacggggatacttttcagtgaaaacaaagacgaataccccaccccgaaatcatccatggcaatttttaccccaagttccttcatctgtgcaatcaggcgcagggtgtcctcctctgcctttgccaggtatgtctcggtcagttccataatgagtctggacggcgccaggctgttttcctccagcaccgtcctgaggaaggaaataaaattcccctgggtaagctggatataagacagattcacactaatctggaaatccggctttgaccggctccattccaggcactgggccatactatgactcagtatccactgtccaaaaggaatgattaagccgctctgctccatcaaagggataaactcgccgggagaaacatccccgtatttgctgcagtgccatctggcaagagcctcagctccgcagagcctgcccgacaatgtgtctacctggggctggtaatggatggtgaatcctgcaaagccgcgctccacgctctcccgcaaaagctccatcagctccagccgccgctccctgtcagccaggatatccctggaaaacacggtcatccggttctttcccatcattttggagtattccagagaatagttggcgctcttaaggagctccagataattactcccatcctcaggataaccagcataccccgccgacagggtacagaagtatttccttcccccgtactcctgctgcctgcagaaattctgctgaagcttaccatatatgcgggcagcttcttttgcatccccttccaggaggaggatgccgaattcatccccatccagccgatagagcatggcattgggcggaagcatggatgccgccttctgggccgtaatccgcaggacctcatccccaaaagaacggtcgtacagatcattgatatttttaaaggaatccatgtccagcaccataaggccgatggaatccatacttttgcggcctgccaggtatttcttgatatttccctcaaattcgtatttgttgtacaggccggtcatatggtcaatctggttttttttgcccagattactaatcatgccggcaaacagctccggctgcccgtccttatctctgagcatcttcccccggcaccgcagccatatccattcccctctcacattcctggcccggtattctatattatgataatcctctcttccgtccgctatactctgattactctccagaaaataggcttcatcatgaggatgaatcagctgcccccaaaatgcggctgcctccctgaccgtctgccccggcagtccgaattcctccaccatggcctggggatagcggaacaccccggttttcatatttcccacaaaaatataatcatccgtgctggctgacagcgcttcatagaggcttccgccggcataatcaaaggtctcatccccgctctcaggtttctcttcaagcctgcgcttggcacgatctatatgatatcctctcttctgtatatacatctgctcatccgcccgggatatgatgtcctccaccgatcccatttcccccggatagacctctgcgattccgtagctgaaagagacatcatactctttgagcaggcgttctcgttcctgacctgccctggttaagagccgcttcatgctttcgtctgccgcgttcatatcacgcccataaaataccatgacaaactcatcaccgctgagacggtacatgaaatccagccttccaaggcactccttggctatggatgccacgtactgaagaagcttgtccccctcgctgtgtccataccggtcattaaccgatttcagctcattgatatcatacagtaccacggtcactatctggttctcacggctcccctgctccagggcccgtataaggcgttcgctgcctcccctgcggtttagcatgcgcgtcagctcatcggtgcgggctgtctctgaaatctggtcatattccgtcatatccacagaattctgtatgtggtaaagcttccccttccactgaatcaggctgtcataattcctgtattttctgccggtcacagaattggtctcgcgccagacacagattttattgtcctccatctgttccagctgcctgattttacagtaagggcaccggcccttcatgtccttttgcagcacctgccaacagacacagccttccggccttataagcccgaaggtttctttcatggttttattcatataaaggatttcatctgtttctacatccgttatatagaaattggtgtccatctggtccaaaacagctgccaggaatgaatccttaaatgagttttgctgttcttccatctcaaaaaatcctctttactatatttcaaagctctctctttattgtaaactctttccagattatgtacaaggggggaaatcaaataaaaagacgcctccttccaggttttatccggaaagaggcgccagcgcacaccttattcttcaacaaaagagaacatatcttttccaaccccgcagagaggacatacccaatcatccggaatatcctcaaatgcagttcccggctcgattccgccgtccggatcgcctacctcagggtcatatatccatccacatggatcacatacatattttttcattatcatttcctccttaaattattatatcatttatcttggttttgaatcatttcctttgatgtcattactatatcataaacattcctatttttctgtgacatttgcaacataaaaatgattttttgatataatatttaatttgccacatattccggaaaacatgcatggaaaaacagctgcccaaacttactccgggcagctgtggcatttacttttattcgccgtccttagctgcagcccttgcctctatctcacgtttctgtacatcgccgggagcctgctcataacggctgaattcataggaataatcgcccagaccgcctgtcatggagcgaaggtctgtattatatccaaaaagttcagacataggaatatccgcctcaatgacctgcttgccgttgtgattggaattcatgcccagcacgcgtcctcttctgcggtttaaatcgcccatgacatcgcctgtaaacttatccggaacagttaccttaagggaggcaatgggttcaaggagcacgggatttgcttccataaagccctgcttaaaggcaaggatggtggccatcttaaatgccatctccgaggaatccaccgggtgataagaaccatccaaaagagtggcctttaagcctacaaccggatatcctgccacaggtccctttaatacgcattcctgcagtcccttctcaacagccgggaagtagttccttggcacggaaccgccgaataccttttcctcaaatacatacggtgtctccaaatcgccggatggctcaaattccatgatgacatcgccatactgtccgtgtccgccggactgtttcttatgcttgccctgtacctttactttcttgcgcagggtctcgcggaatgcaaacttaggctggcttaaggtcacatccaccttatagcggctctgcagcttgctgattaccacatccagctgctgatcgcctatgccgtataacagggcctgacggttctcagcgtcgttgaccaccttaagggttaaatcttcttccatcatcttagccagagccgtggataccttgtcatcctcgcccttgttcacagccttatatgccatgtatgtgtatggtgtggaggtctggggcttatggtatacaatgggtgccgtgcgcacagccatggtatcgccggtctgggtcacagtcagctttgcaacagctccgatgtcgcctgctttcagctcctgcacctcaatctgatccttgccacgcaggatatagagtttgccgatcttttcctcagtatccttattcacattgtacaccaccgtgtcgcccttaagggtaccggtacaaattttcatcagtgagtacttgccgatgaatgggtccacaatggtcttgaataccctggcggacagggatacatcgtcgttgtacttggctgtaaagcgctcgcccgtggaaacatccacgccgatacactcaaaatggtcaggtgacgggaagtatttgtcaatggcctgcagcaggaccttaaagccctggcagttaatgccggaccccatcatgacaggaacgatgtccccttcaataacatgggtcctcagcgcggtggaaatctcctcctgggtaaactcttctccaaggaaataacgctccatatattcttcactggtctcggcaacggcttcaatgagggcgtccctggcaatggtcaggtttttctggacataatcaggaatctcacactcctcataatcacttaaatgagtgaaacggcgtccgcccatctttaccacattgacgaaacctacgaacttttcattttcacggattggcagctggaacggggcaatcttacgtccgaacttagtctccagcttaaccacaagctcacgatagctggcatggtcatcgtccatatttgtgacgaaaatcagcctgggcaggttgtacttctcgcacatctcccatgccctctctgtaccaggctcaatacctgccttacagttgacaacgataatggctgcatcggcaacactgattgcctcctcaacctctcctacaaaatcaaaaaatcccggcgtatccagaaggttaatcttaattggcccgtcctcgccctcatattccagaggaatcagagtagtggagatagaaaactgtctcttgatttcttccttgtcataatcgctgatggtgtttccgtccggcaccttgcccatacgttttgtaacaccagtcagcagcgccaatgcttccgcaacggttgtcttaccagcgcctccatgtccaagtaatacaacgttgcggatttgttcagttccatatacgttcataaacttccctcctgttcattaaatttaagcctatgcgtatattttactaaatttttcagaatttttcaagcattttatatgatttgcacaacattcttttaagagctgattgcatgtaccgcattcacgcatgggaaccactgaattcccaatgtataagttcattattctttttcttttttgccagataaagcgcctgatccgcttgggctaaaagcgcttcataagaagtgtctgcattggaagtaaaagcaacccctgcactgattgatacctggtcatgtatatgcagtgccttttgccgttcctcccagtctgtcataagtgataaaaagaaatcttcaacctctcccctttgtctaataccggataagtatagtgtaaactcatctcctcccatacgggcggctaaggaggccggagatataaccgatttcaggctttctgaaaatgaaattaatgtcttgtccccaataggatggccatactgatcattaatctttttgaaccagtcgatgtccatcattaaaaatgcaccattatctccatctgcctgaaaacgttcacaagtttctttaaaatacagacggtttaataatccggtcaaagagtcatgcctcagattataaacaatctgtgtatgagttttttccaccatatgatgggggaaaaactcatcactcatttgatttggatcggcaacagactgatgaatatgtactactttccacccgttctctgacttttccaacacaaccgtaaacctaaaacacatatcgtatagaataccttcttccgaatcctccctgacaaccagctcccccattacaagcgaatgggaatcggatagttctgttgtctgataccattgatcccggatcacaaaatgcccggtccattcatggctctcttctgtaaacttggcaatgaattcatgtaaatttctctcaatctcatgagctcccgtccctataacgctaattttatcagagacaaactcatttacaagatcataccgccgatcctctagatagctcttccaaatgtagcggcaaaaatcatttgcacttatattctctcccatatttacaccccaatacgtttaattttgctgataattcatctccgttttcacttctattatacaatttacttttttctaaatgtgttcttccttttaatcctgttcttttcattgtctgcagttacaggtgcttccaaataaccagacgcttccgcaaagctattataccatacatagtgtcattttcactatgataaaatacatttgtccttctgactgcccttttcctgttactttaatctataataaaaatgcctgatagccaattgaactatcaagcattacatatgtgcatattctgttgtaaatacagcaacgattttggccttctgttttcctatcagcttttccaattctatcgctgataacagtccccttagatacacttgaaccaattccagctgattcgggccgatggctgccaccagttccaattttgtaatatcattcacctcctcacattcattccatttaactgtatgataacacaatccatcccgtcctgctctaaatcgccgtaaaaacattgtatgttccatgtaaacttaaactcccaaaaggctgcctttatagtatgtctgcccgcaaaaagcagccttcattcagactgctttctgcaacgatacagataaaactgccgtttcatgacagcacaatatcgtttcaccctgttaccagttgcgtacaccctgtatgtgtatgaaacggaccttttcatagatataggaatccaggggccgcatatatgcatcataactgtgggcagccaccaaaatattatttcccgccacatcaacaaccacaggactgtggtaatatccgttcttatttcccagctgtacaatatcgcccggctccacgcccttttctttggtttccaccccatagggacctgcggatttatttcctgtgagaaaattataaagatacacgaccccggtccagctgggacttctgttggatccgctgctgtaataccatcccatggtcggcgtgtagttcatgaccccgcttccggcataaatacactgggatgcaaaattggtgcagtccccgcccatatgttcaaaatccagataccgcggattcctccccttagcccatcgtttcgcgtattccaggacagcttccctctgatatccaatctccttcaatattctatgattcctgttctgtctcaacctttgttactattatatgaccatggatatctaatttatatcatgcctaatttatatcatgctttattatgtgaatgaaacccctctgaacaccatgctgcacggttttggaaatccgggtccgcagtcttgccaaactgcttaaaaactccggctggacacatacctatgactggacgtctctcctttatgaccggacatcccatgtctcagagaaaacaacagatatcgaaacactcaggcatattggcgaacaagaatataatggggtaaagcaggctgatgttgtcattatattgactcctcagggaagaggaactcatacagaatttggaatggccatcgccctcggcaaaataatctatttgtgtcataaggacgatacgtatttcaagtgtgatgataatacatcggcgttttattggcttccgcaagtaaagcatcttattgggaatacagattatattgccgcccagctgcttaatgcccactttcatcctcacttaaaagcgtaaaagtttaaagtgataaagtattgactttttttacagagtcgcttacactattactgcatatgaatcattctgaagaatatatactatggtccatacaatctgcatatttataaatttgcataaggagtactgaattatgattatcattatgaaacccaatgcttctgatgaagcggtcaaaaaggtaacaaacctcattgaatccaagggactcacagcccatctgtccaagggctcccaggttaccatcgtaggcgtggtcggcgacaagaccaagcttttggacaccaacattgaaatcagcgaaggcgttgacaaggtagtggctgtcacggaatcctataaactggtcaataaaaaattccatcctgaggactcggtgattccggttggcaacacccacatcggtccgggcaccatgaccgtgatggccggtccctgcgccattgaatcccaggaccagcttatggagactgcatatgcggtaaaaaaggcaggagccaccttcctgcgcggcggcgcctacaagccccgcacatccccctactccttccagggacttgaggaggagggccttaaatacatgaaggaagccagggaagccacgggcctcaatgtaatctgcgaagtcaccagcgcccatgccattgagtcggctgtgaaatatgtagatatgctgcagattggcgccagaaacatgcagaactttgaactgttaaaggaggctggcaaatccggtactcccgtattgttaaaacgcggattgtgtgctaccattgacgaatggctcaatgccgccgagtatatcatttccgagggcaatcctaatattgtgctgtgtgagcgcggcatccgcacatacgaaacttccaccagaaacaccctggatatcagcgctgttccggtcatccgccagaagagccaccttcccatcatagtggatcccagccatgccacaggtgtcagagcctatgtggagcccctggcaaaggcagccattgcagtgggcgcggacggccttatgattgaagtccacccctgtcctgcaagggcactgtctgacggcccccagtccctgacatttgatgcctttgaacagctgatgaaggatctggctccctatgcagagctgtccggacggacctttaaggcacagtaacagaactttacggcactctcacttcagggagtgcttttacatatgcccggtgcgcggcctctgcccttacggcatcccttttcatacatttaatccggcgcatccggttcccgcatttacaggaggagataccaattatggaaaaaacgaccatgaccgattccaccatcgcattcatcggactggggcttataggcggctccattgcccgcgccatccgaaaaacacggccggatattcgtatcatggcctatatgcgttcccgctcccgcctggagcaagcccggaaagagggaatcgtggatgtgattttggatggaattgatgagaacctgcgcgaatgtgacctgatattcctctgcacaccggtggagtacaacgcaggttatctttccgccatacggccctacctgaaacagggagcactgattacagacgtgggcagcacaaaatgcggcatccatgaggaaatcaggcgccagggcctggaatactgctttgtgggcggccatcccatggccggatcggaaaagaccggctatgagaattccacagaccatcttctggaaaacgcctactatatcgtcacgcctcccgagggaaagaacagctcccgcccccaggatttaagctccaatgcagaacgcattgtggcggttgcaaagaccattggagccattccccttgttctggattacagggaacacgacaaggtggtggctgccatcagccatctcccccatcttgtggcttccagccttgtgaatctgattaaggatcacgacacagcagacggcaccatgaagcaggtggccgcgggcggttttaaggatatcacccggattgcctcttcctcccccgagatgtgggaacagatatgcatgaccaatgtagcccccatatcggacatcctggaagcatacatcgcatctttaaacaaagtgctggaggaaatcaaagaacataagggacaggatatctacaggctgtttgagacctcccgtgattaccgcaattccattacagacaaggccaagggatccgtggagccatcctatgagttcactgtggatgtaagcgatgaggtgggcgccatctccaccatatccgttatcctggctgccaagggcatcagcattaagaatatcggcatcaacaacaaccgcgaacggggtgagggagcgcttaagattgccttctatgacgaggcttccatggaggctgcatggcagaggctggacaaatacaaatacgagatgttccgcatgtaatccaagagaaaggttaggtaacagattatggaatttaaaagagcatcccatttcaagggcgaaatcagggttcccggagataaatccatctcccaccgggccgtcatgttcggctccatcgcacaggggcttacagagatacacaattttctccagggagcggactgcctgtctaccattgcatgttttgagaaaatgggaattgatatagaaaacaagggcgggaaggtgctggtccatggccgcggcctgcacggactgaacgcgccacgggaagtcctggactgcggaaacagcggcaccaccacgcgcctcatatccggaatcctctgcggccagaactttgacgtcacgctcacaggagacgaatccatctgtaagcggcccatgaagcgtattatggagccccttgccatgatgggagcccgcatcaccagcataaaagacaatggctgtgctcccctgctcatcaagggaggtcctgtccacggcatccactatgactccagggtagcttccgcccaggtgaaatccgccattatgctggctggtttatatgcagacagccccaccagcgtaactgaaccatatgtgtccaggaatcactctgagctgatgctgcggctttttggcgcccaggtgtccaccgagggaaccacggcagtcataaagcctgccaacgaactccatggcaatcaggtcatggtgccgggagatatctcttctgccgcctatttcattgccggaggccttatggtgcccggctcacaagttctgatacgcaatgtgggaatcaatcctaccagggacggtatcctgcgtgtatgccgtgatatgggagcgcatattgagcttctgaatgtaagcggcggaacaggcgaaccaaccgccgatatccttgtacgccacggcagccttcatggaaccgtcataggcggctccgtcatacctaccctgattgatgagcttcctgtcatcgcagccatggcctgctttgcagagggtgagaccgtcatccgggatgccggagagttaaaggtaaaggagtccaaccggattgcagtcatggtccagggactggctgccatgggcgctgacgtgacagagacagaggatggaatgattatccggggaggcgctcctctccacggagctgtcatcgacagccgcaaagaccaccgtattgccatgacatttgccgtcactgccctgtgtgcggacggcattacagagataagggacgctgactgtgtcaatatatcctatccaggcttttacagcgatttaaagaaactggcacagggataagcaaaaaccgcatccactccggctttattccggatatggatgcggttctgtttttgtggtattctctctttttatggtgtttcttttgccgctgccgaatcccaatacgtcctaccccagcgccacatccagtatcatcatgaccacaaaaccaacggcaaatccaatggttgccacattggaatgctctccttcagctgattccggaatcagttcctccactaccacgtatatcatggcgcctgctgcaaaggacaggaagtatggaagaaccggacctaaaaactcggccagcaccagcataagcagggcgcctatgggctccactacgcccgaaagcgttccataaatgaatgctttccctttcccggctgcctccttaagcggcagggatatgatggctccctccgggaaattctgtatggcaatacccacagacaaagccagggcgcctgccatggtgattgtcccgttctgggacagaagtcccgcaaacgcaacacccactgccattccctccggtatattgtggagggtcactgccagcaccagcatggtactcttcttccagtcgctctttggaccttccggctgctctgtatcaatatgcagatgaggtataatctcatccaacaggagcaggaaaccaattcccaaaagaaagcccacggaagcaggaatgaaagccagcttgcccatatgtccgctcatgtccatggacggaatcaaaagggaccagacagaagccgccaccattacccctgacgcaaatcccagaaatgccttctggacactgggttttaatgcgtttttcagaaaaaacacgcaggctgctcctgccgtggtcccgataaagggaatcatgatccccgcaaatatactgctcatctcaatccacctctgtcatttcctgagccccaatcctcccttctacaggaatcctttgagcttcagatagtcttttatcagttgaatcatctggtcgtaatcaatccggctggcattgatgggaaggtcataattttccatatccatccactccctgccggtaaaatagcggtgatactccgttctctccttgtcaatccgtctcattctgcgaagcgcttccgcctcatccaccttatccacatccataactctgcggattctggtgaccgtatctgcatacacaaagatgcgcaccagattatccatctggtcctggagcacataattgccgcagcggcctacgataatacatgtctcggaggctgccagcctgcggatgaccgatgactggaaccggaacaggttctccggcgaggtaatgttggggccgtccttatccggttccgtcagctccggcttcatgctggtcacaatacggtatagcatgttatttccagccctttcatcagccagcctgaagtactgttcccctatggcgctggtctcagatgtcatcttaagtatctcttcatcataaaaatgaatgccaagctcctcagccaggcgtttgcctgtcaggcggccgccgcttccgtactggcgttcaatggtaattacaaaatgtttgtcattcatattgagtatcccccttattcctaatccacagccctgcccgtgacagggccgtggtctctttcatgtctatacaatgtctatatggcacattcccatagcgctgagggcattgtgatggctctggggagtcacgcccgcgcagcaggacccgtccacctgtatggatgtgtcaggaactgctgccttaatcagcatggcgttggatatgacacagatatccgtgcacaggccggccagctccacaaagtcatactgtcccctggctgcgtagtcagccagctccctgcttccaaaggtatgcttctcaaaacgggttcccggaactcccctgagctccggtaccagttcccaccccggcgttcccttgacacagtggaccaccggaagtttcttcccttccatcgtatccatataatcagcaaaatgggtgtccagggtaaacaccacctcatccccggcatcctggtacgccttaaccttatccagcacattagggacaatggcccgggcctcagggctgcccaaagctccatccacaaaatccttctgcatatccaccactacaagtaaccggctcatggaactttcctccttgttgtgaacattttttatttgtgaatacgtttattccggttccaaagtgttcctttccatacctacagtctaccacatttcatcaatcaataaaagttcttttatacttttgtgtgacattgcgtgactttatatgaatttttaaaacactcttgacaaatccactttattgtattaagatacggattaataaattaaaccgtagagaaagaggagtaagctatcaaagctttaacacagagagccgcaggcggtgggattgcggtatggggctggcagctgaatggacttttgagggcggtcttgaaggattgttttatctgtagggaccgacggattccgcaaccgttatacatgcggcgcatatgttggtatgtgtaaagtggactttttagtcaatttgagtggcaccgcggatttcattcgtctcaatcgtagcataagctatggttgggactttttttattccggctttgtccaaagggcagccctgtcatgaagtcccttatccaacggcattttttatcatccaaatatagttcaaaaacaggaggaaacaaaattatgaaaaaaacaatcgcaatgcttttaactgcagctttaagcgcatccctcttatcaggctgcgtatccacttcccagggcacttcagcggcccagtccgctgaaacctccgccgaaaacgggtctgtccagaacgctgagagttcagcctccggcgtgtcggccgctgatacatcatccgctgacaagaccggtgagtccaaggcagaatcatccagcgattcctacaccatcggcgtgggacagtttgcggaacacggctccctggacaactgccgcgaaggcttcatggccggcctggcagaggaaggcatcgaggaaggcgtgaacctgaccgtgctctatgataattcccaggccgacggcggcacggccagccagattgcaaccaatttcgcaggcaagggcgtggacctgatgtgcggcatcgcaactcccatggcacaggcagaatacggtgtggctaagaagtcagacattcctgtcattttcactgctgtaaccgaccccgtagccgcagagctggccaatgcggacggcactccggtaggcgagattacaggcaccagcgataaactccctgtggaagcccagcttaagatgatccgccagattcttccggaagcaaaaaacatcggcatcatgtacaccaccagcgaggtgaattctgaatccgccattgcagagtacaaggagctggctccccagtatggttttgaaatcgtggacacaggcatctcctcttccgctgatattgccctggctgccgacacccttataaacaaggtggactgcatcaccaacctgaccgacaacacggtagttgcctcccttcccgttatcctggataaggctgccgccaagaatatccctgtattcggcagcgaaattgagcaggtgaaaattggatgcctggctgccatgggactggactacatcgaactgggcaagcagacaggaaagatggctgcacaggtactgcgcggcgagaaaaaagccagtgaaatgaattacgaaaccatcaaggaagccgccttctacggcaacacacaggtggccgggaatctgggcatcacactgccggaggatttgactgaaaatgcagctgagctgttcactgagattgcccagtaaagctctatcattattatctggaggaacatcatgacaacgattattttaggtatctttgaagaaggcctggtgtacgccatcatggccctgggcgtatacatcacataccggattctggattttccggatctgtctgtggacggaaccttccctttgggagctgcttttaccgctaccggcatagccggaggtttcatccatccggctgcggcccttcccctctcctttctcttgggagccatggcgggctgcgtcaccggacttatccatgttaagttaaaggtacgggacctgctgtcgggaatcattgtcatgaccgccctctactccatcaacttaagggttgcaggaaagtccaacctgcctatcttcagcaaggacacgattttcagcaacccatggctggaacgcaccattccccaggccttaaggccctatacagtaaccatcatccttctggttatcgtccttatctgcaagctgctcctggacgcttacctgaaaacccgttccggctatcttctcagggccgtgggtgacaatgatgtgctggtgacctccttggccaaggataagggcatggtgaaaatcatcggcctggccattgccaacggatttgcagccctggccggcagcgtgtactgtcagcagaagggattctttgagatttccaccggcacaggaacaattgtcatcggtctggccaatgtcatcataggcacccagctgttcaaacggttcggcttcgtcaagtccaccacggctgttatcatcggctccatcatctacaaggcctgtgtatccctggccctgcttctgggggacttgacgcttacctttggaaacattactgtctccttcccggtgacagcctctgacttaaagctgattacatccattttgttccttattatcctggtggcaagctcctccaggggaaagaaggtgaaaagccatgcttgaactgaagcacatcaataaatactacaatgccggtacagtcaatgaaatgtgcctgttcgaggacttcagcctgaccataaaggaccatcagtttgtgtccgtggtgggaagcaacggctccggcaaaacctccctcttaaacatcatctgcggcagcattcctctggatgagggacgaatcataatcagcggaaaggacatcacccggattcctgaatacaagcgccagcgccgcattgggcgggtttatcagaatccggccatgggcacctgtccgaccatgaccatactggaaaacatgtccctggcagacaataagggaaaggcctttaacctcaggccgggaaccaaccggctgagactggagtattaccgcgaatccctccgctccctggggctgggactggaggataagatggatgtgaaggtgggagtcctttccggcggccagcgccaggccatggcccttctcatgtccaccatgactcccattgaattcctgattttagatgaacacacagctgccctggaccccaagactgccgagaccatcatggagctgaccggaaaaattgtaaaggaaaaaaatctgaccactatcatggttacccacaatctgcgctatgcggtagaatatggggaccgcctcctgatgatgcaccagggccgcgccgtggtagacaaagaagccggggaaaagcaggcgctctgcattgacgacattctggaaaaattcaatgaaatcagcattgaatgcggcaattaaattaaaaagcagactgaaagaggaccccaaaccgcaggacagcggtttccgggtcctcttctgttttcttttattcctgctccttaaaatactttttccggtaccgtatggaccgcttcagcgcctggaccatatcagccataatccgaatctccacctcgtcgcagtcatccacagcctccataaccgcatttttaaaaatgtgctttccatatcgtatgttatcacaaagcagcacatccggagtaatctccagggcattggctatggcaatcagggatttaaggctcacctgggtacttcctgtttccacattggaaatatggggattggataatcccgtaagctccgccagtttttcctgagtcatttctctttgtattctctgtatcttgattcgttttcctattgccttatagtccagttccatattgtatatacaacttcctctgcttattatttacttgactattgtaatctttgtattagtatattataataaactggtcattttatactttgtaatgcaatactaaaaactccttttatttacagctaatagggaggaagtacagccgttcggtaataggtattaagtaatcaaaaagagtgttgaaatattgtaattcactttttctctgccttttatggacgtctttcatacaggggggttattcatatggttgaaaccaagaaaacattgcgccgggaagccgttacagggggtatctttgaatgcagatatgataaatccctgaccctgacgcaggcagacaacagtctgttccggctgctgggcatgaacgcaggcagtcttaagtcaggtactcccatctcctttctggaccggatatgcgcggaagaccgcccgattttcctggaaaaaatacggtaccagctgtcccgcagccgtgtattcatgtctgagctgcacattgtgaccagtgaaggacagctgcggtggattcatgtatgcggggagctccttaacgcggaacaggaaattccctgcctccactgtatcttccatgatgtgacagatgccagggacagacaggaacggcttgccatagaaagccagatctacgacatcatattatcccagacccaggatatcatatttgaattggactgtcttacccgggatatctactattctcccacctttgagaagaagttcggttaccagattccagtcaagggattccctgactctatgtttgccactgacatcatccatgagaaggacaagatacttcttcgacgctgttttcagtccatcctggcaggccagaaccagatgcagtgcgaataccgtttaaagcacaggaacggccgttatctctgggtcagcgtgaatgccacggccatccgggatttaaggggccggctcctcaaaatcgttggcatcatctcggatatcaatgagcagaaggaggagatactccgggcaaaaaaggacgccctgctggatccccttaccagccttctaaaccgcagggaatgcatccggcggatcgaagcctacacaaggaccgaggaagagatgggagcgctgattctgattgacatagataatttcaagtccatcaatgatacaaacggccatcttttcggtgacaaggtcctggtggacctggccgcggccctccgtttggccttccgcagaaatgatatcacagcgcggattggaggtgatgaattcattgcattcatgcctcacatacatgtccgcggggatgtggtgcccaagcttgaaaccattctctattccctgtcccggtgcgcagagacggacgggaaggcagatgctgcaccggagtcagacagcgcggttaccttcagcatcggggtcagcttttatcctgatcatggaagggatttttcctccctctatgaaaaggctgacgcagccatgtaccacgccaaacgaagaggtaaaaaccaatattacatatataaggaagatgcaccggaggcataagattcctgacctgccggaaataaagttgatgggcgcacccaaaaagggctgatatccggcttagttcatgccggatatcagcccttctcctgtcctgcaaaatcccttgtcaggattccgattattctgcaaataacataatcttggaagctgtgttctcatcatctgaccagaccacacatttctttccctgtgtcaggtcatccagagtcacgatgtttctggtgagatacgggaagatgttgcagtcctctgccagtgtgaactcggttccgtccgcagctgtcagcacggatttggatgtgcctgcatccgtaaccatggacttgacctccacataatcaggcgccttggcgtctgccggaaggttggtgaaaatcatgaccgcattggtcataggcggaaggctcatggtcatggccggccctatgtaggcataaatggtatccccgtctttcacatcctccagagctaccgggagacctgtcatggcgtccaggatataagtcatatcgtcagccacattcaggatgatttcaccgctggtgctcatgcccgactgattgtcaatggaaagcctgccgtcctccatctttgtcacaggcccgtaaatccggacggactggggaacctcgggctggctctcttccatgctctcaatggctccggtcaccgactccactacggtggtgtcactcacggtggtctcttctgtattctcttctgctgtcacggagctgccggacattgtctcggcgttggcaccggctgagcaccctgctgctcccagggcaatggctgcacagattcctactgcatataaatgatattttctcaatataatcttctccttttcatctgcctcccgggaagccgtgggcctgccggaggcacttgttatgtctgtatgagaagtatatatcatttactgtccatatccaataaagtatttcttaagaattctgaatttagaatgaaccttacgacaaatgttacaaaatgtttacacaaatacggtctgcctttaccgggccatctcgctctgaggtcctgcctgattgtgggcatggatgatggtctcgatttcttccaggttggaagacggcaggtctccgggaatggtgttcttgacagcagccgtggcattgccgaaggcaacggccctggcacagtcaccgtctgtactgagcagcccgtaaagcgctccggatatataggcgtcgccgctgccgatccggtccaccacctcaatatcccggtacggctcctcctcatagtactcatccctggctgcatcgtatatcacagagccaaaggtatgccgcttgggactgtggacgattctctgggtggaggccacaatggagatagggaattcctcggtaaagctcttcatcatctccctggcagtgcctgtctttaaaaaggtgagcctggcagtgtcctcggaacagaagaaaatgtccacatagggaaggattctcaggatacactccctggcctggtcccctgtccacagatttcccctgaagttaacatcaaaggataccagggtacctgctgctttgaaccgcttaatcatctctatggtggtctcgcggatgtcctcgttcagggccagggtgatgcctgtggtgtggaaacatttggaagccgtgtacacctcctccggtatctcgtcaatatccagggagaaaaaagagctgtggttgcggtcgtaaatcactttcggctttctgggataagcgccgttctcataatagtaaatgccgaccctggctgcgggggactggtcatacataaagaaatcatcgctgaccccgaaggaacgaatcttgcctttcatgaagcttcctatatcatgggccggaagcttggatataacgcctgtgtgaagacccagaagagccgcgcccactgccacattcagctctgcgcctcccacctgcttgacaaaggtatcgcctctggacagacgctcgttatccgggggcgacagccgaagaagcacctgtcctaatgtaagaaggtcaaaattcctgccgtttgtttctaccatatcatatctccttttcaaataaaaacatataagaaacggctaatacctctgaaaggattagccgtctctgattgtctgattgtcaatatcctgatttatctctgaacacggcctgaaccgtcgccgccggccagattctcaacatcagccctggttaccaggttgaagtcgcctggaatggtgtgctttaatgcggatgcagctactgcatactccagggccgccttcatatccttgccatccaccagaccgcagatcaggcctgctgcaaaggaatcgccgccgcctacacggtcaacgataggtgtgatgtggtactttctggagtggtagaactcacgtgtctttccatccatgatgcaggcagaccagccgttatcggaagcgctgtggctctcgcgcagggagctgatgatatacttgaagccgaacttatcagccatctggttgaagatgtcaacgtatcctgccagttccagctcgccggaggtaacatcggtgttgcccggcttaaagcccagaaccttctctgcatcttcttcattgccgatgcagacatcaacgtactgcatcaggttggtcatgaccttctgagccttctcagaggaccacagtttcttacggaagtttaagtcaacggacactgtaacgttgtgtgccttggctgcctttaacgctgcctcggtgagctcgatggccgcatcgctgacagctggtgtgattccggtaaagtggaaccagtcagcatctgcaaaaatctcgtcaaagttgaactgatccgcagttgcagtggagatggagctgtgggcacggtcatagaccacgttggaagctctcatggcagagcctgtctccaggaagtagatgcccagtctctcgccgcttctggcaatgtgctttgtacctacattatactttctcagtgcagccactgcgcactcgccaatgggattagccggaactgcagtaatgaattcagcttcatggccgtagtttgcaagggaaactgccacatttgcctcgccgccgccgtaattgatgtcaaactcgtctgcctggatgaacttctcattgtttggggtagataatcttaacatgatttcgcccatggtaacaatctttgccattgtatgattctcctttaatctcttcttataatctctttttaattatatttggaatgatgcttactgtaaggtatcatctatgcccttgccgctgcaacagctgccacgaactcctgagccttagctgtaacggctgcgaagtcgcctgtcttggcgccctttgtcaggctgcttcctgttcccactgcgtaagcgccggccttgatccacttgtcaacattatccacgtctacgccgccggacggcatgaactcgccctgtggaagggggcccttgaaggagctgatggctgctggtcccacgatgttgcctgggaaaatcttaatgatatcacagccggcttccatagcggtaatggcctcggatggagtcataacgcctggcagcatgggcactctgtaacggttgcacagacggatggtgtccacgttcaggcccgggcttacgatgtagttagctccggccaggatgcaggcccttgcggtctcaggatccagtacggtaccggcgccaattacaatcttgtcattgcctttatacttctcagccatcagtttgatgaagccaaccggatctccgtcatccatggtcatggtaagctcgatgaaattgatgccgcctgcgataatggcgtcaactaccttctcaccctgctcatagttctttgcgcgaacaacagcaaccagacagtcttctttcattcttgctaaaacttgttctttcttcatcttcattctccttctctttaaattcgcatatgcgaatcactttcacaattacgatttgtatacctaaattctaatcgctgtcacatgatttgtcaacagcaaaacaggtaaaaatataagtttattttcctatgcatgcccgatgtaacccaacagccgtgacagctgggctcccttatcgcttaccaggcgtcccagggcgtcataatcctcggtgggtttatacaggctggagacgctgatggctcccatcacattaccatcctgcccaaatacgggagctcctacgcattccatgtgctcttccagctccctggcgtcaaaggcatatcccttttcacgcaccgatttaagttccctctcaaattcttccctggtgcagatggttctatccgtgtgcttcttaaagctgatgcgtgacaatacgccgtcccggtcctcatcctccgtgtaggccatgattgccttgccgagggatgtgcagtaaatgggattttttgttcccacagtggccgtggtaatgatgggattctctggttcaaacttgcagatatacacaatggaatcatctgagcgtatcccgaagaacacggttttccccacctccctggaaaatgccttgagcaccgggtcaatggtgcttataaagtccagattatttgtatagttaattccaatccggtaggctgtcaggccgatggtatatctctgcttctgttcccttgccacatgaatcataccggtctgcaccagtgtggtcacgatatcgtaagcgctggtcttaggcatgtccagctttgcacatatctcatccagggtaatgccgtccggtttttttgacaccagctttaatatttctacggtgcgcagcgtggttctgtttagtttcatggacacctcccgctcaattattcgtatatacatcttttatccgtatatacgatatctgttattcagtatacctcagtccgccaggagatgcaagaagaaattacaattaatactgccataaataatactgccataaaaaccgttttttctacagggtcactccctgtttaaagatagccatatcatggaatcctgcttcctctgacttgaccttcctgccggatgcaacagccaggacgtaattcagcagctcctttgccagttcttcctttgtcatgtcctccaccatgcggcctgcgttaaagtctatccagttgtccttatggcctgccagcctggagttgctggatatcttgaccgttgggaccggggaggcaaacggggttcctcttcccgttgtaaagagcaccatatgggcgccggatacagccagggccgtggaggccaccaggtcattgccgggagcgcttaacaggttcaggcccttcaccttcaccggctcgccgtattccagcacgccccttacaagagcgcttcccgatttctgggtacaccctaaggacttgtcctccagggtggaaatgccgccctttttattgcctggggacgggttctcgtagatggtctggttgtggctggtaaaatagttcttaaaatgattgatcaggtccacggtcttgtcaaacagctccggagaggcgcagcggttcatgagaagtgtctctgccccgaacatttcaggcacttccgtaaggatggtggttccgcccttgctcaccagcagatcggaaaacgcgcccaccaccggattggccgtgatgccggacagtccgtcggatccgccgcacttcatgccgatgaccagctcggcggcatctatcttctccctggaaaatgcgcctgcgtaagctgccagctccttaagaagtcccatggcagtttccatctcatcctccacatcctggcactgaaggaacttcacgcgatcctcgtcgtacgctccgatatagtccatgagcacgggaatgttgctgttctcacaccccagtcccagcaccagaacacctcccgcattggggtggcggatcatatctgccagcacctttctggtattctcctggtcatcacccatctgggaacatccgtaagggtggggaaatgcaatcacgtcctccacatttccaacagccagtgactttgcctggttctcaagggccttggcaatggagttgacacagcctaccgtggggataatccatatctcgttgcggattcccgccttgccgtccggcctgcggtatccctcaaaatacacatgctctgtaggggccacatcgttttcctggggaacatagtcataggtaagcacatcgccaagagcagtcctcacattatgcacatgaacccacgcccccgcctctatgtcctcctttgcatatccaatcctgaagccgtacttcaccacttcctctgcggcttttatgaaccttaaggcaaacttgtgtccctggggtatgtcctctaaaaggctgacctttacgcctgccacatccagggtctcaccctttgcaaggggacgcagcgcaaccgccacattgtcattttcatgaatttttacaatatcctgcatggccattcattctcctatcatcttgttttctttgattttgtgtgcctgttccttgtttgctgtctcatgacttatttttgtaagtacttacaattattctactcattatcaggtcagaagtcaataaaaaaatagaaaagtattgcattacttactgggaatatgtataatatacttagcttgtaagcgcttacagaatgtgaggttagtttatgaatatatatgatgtttctgaacatgctggggtgtccatcgccaccgtatccagggtacttaacggaaatcccaatgtcagtgaaaagaccagagaaaaggtcttgaaagttatggacgagttgggttatactcctaatgtgttcgccagaggcctggggttaaataccatgaaaaccatcggaatcatgtgttccgattcgtccgatccgtatctggcaggcgccatctactatctggagcggggactgcgcgcccacggctatgacgccattctctgctgcaccggctatgacctggacgccaaacagaagtattttgatttgcttcgttccaaacgggtggatgccatcatactggccggttccaagttcgtggagatgcgtgccaaggataatgcctatatcatcgaggctgcttccgaccttcccatcatgctggtcaacggctttctggaaggcgagaatatatacagcactgtctgcgacgatcacgcggcggtgtacggcgccgccagccagctgctctcctccggacgcaggcgcatcctgtatgtatacaccagctattcctacagcggggtcaataagctggaaggatacaaagacgccctcaaggcaaagggcatcacgccatctgacgaactcatccgccagtgtcccaaggacatagaggctgccagggagctgctgctgtcccttcacagggaaggattggaatttgacgctgtcatcacctccgacgactcactggccgtgggagctgtgaagtatgcccatatagcggatatctccattccccgcgatctgagcatcatcggctataacaattccctgctggcccggtgtacggacccggagattacatccattgacagtaaggtggaagcgctctgcaccaccacgatcaacactctaatgggggttttcagcggcgtgaatgtgcccagcaggaccacaatcgcttctgatttaataaaaaggaaaaccacaaatttttaattcttaaggaggaatatcacacatgaaacaatttatggacaaggatttcttattatcaactgatatggccaagacgctgtatcatgattttgcagagaatatgccgatacttgactatcactgccacatcaatcctcaggaaatctatgaggaccgcaagtttgacaccatcacacaggtatggctgggcggcgaccattacaagtggcgccagatgcgttccaacggcgtggacgagaagtatgtgaccggcgacagcacggacagggagaagttccaggcctgggcagagaccatgccaaagctcatcggcaacccgctgtaccactggagccacctggagctgaggaagtacttcggataccagggctatttaaacggcgataccgccgaggaggtatggaacctgtgtaatatgaggctccaggaggactccatgacggtccgcaacctgattaaacagtcaggcgtgacactgatctgcaccaccgacgacccggtagactccctggaatggcataagaagattgcagaggacgacacctttgatgtacaggtacttccggcatggagaccggacaaggccatgaacgttgaaaagccaaccttcggcgcttatatggctcagctttcccaggtcagcggtgtacagattacggattttgcatccttaaaggaagcgctcaaaaagcgtatggcattcttcgcatccatgggatgctgtgtatccgaccatgccctggagtatgtaatgtatgcgcctgctgctgactccgaggtagatgccatacttgccaagggcttaaagggcgaggcggtatccaaggaagaggagctgaagttcaagacagccttcatgctgtttgtggcccgggagtataatgccatgggatggattatgcagattcactacggctgcaagagggacaacaacggctacatgttcgagaagctgggtgccgataccggatttgactgcatcaataactatgctccaagcgcgcagatggctgacttcttaaatgccctgagcaccaataacgagattccaaagaccatcctgtactccctgaatccaaatgataatgcttccatcggaaccatcatcggctgtttccaggagaagttccccggtaagatccagcagggctccgcatggtggttcaacgaccacaagaccggcatgaccgagcagatgacatccctggccaacttaggatgcctgggcaacttcatcggcatgctgacagactccagaagctttctgtcctacaccagacatgagtacttccgccgcatcctctgcaatctgattggcggctgggtagagaacggcgagtatccggccgatatgaaggcactggaggaaatcgtaaagggtatctgctacaataactctgtgaaatactttggatttaagctggatgaagtaaagtaaactgaaacagcataaggggactgcctgattgggcaatccccttttttgctctatacctctattgtcctcacgttcacaccggggaggcgggttttccccttctcgcaaactgcaggaaggcggttgccagcccgcttatgcacagcattgcgtaaaagctgattcccctgcttaaaagcatcacggaaaagctctggcctgcccctaaaagggtgcggtacagcacgagaaagcttccctctgaggctcccacggaaccgggaaggggtactgcggtgactgccagactcaaaatggcctgaagggccaggaaatcttttgccgatgcggatatgcccagggcacggcaggcccagtaaggaaccagatagagagcagtcagctgaacagcactatggatgaagattctcaccgccgccaggggatactgcctcagataggctcctcccctgctgtactcattaatcagtccctccaccttccggatggcgcgtttcctgttttttatgattccggccctgctcagtccgcctgcaatgcacagcattattttctccgccaaaagaccatggaagatgattaacaggataaggccggaacagaatccatttaccagtactccgaataccaggagcagccgtatgattctgccctgccccatgacaaaggacagattggcgcccaccataacgcacccgtaaaccagcaccgtcatctgatacaccgcggctgtggccagaagggaaaatgaactgtgggctgccccaaagccgtccctgaccatataataaagctgcatgggctgccctcccgtggcggaaggagtgatggcgctgaaataaaaatccgtgaacgcataggaaagagagcgccagtagggtacctttttgccaaaggtccccatcaaaagcctgatattggccgcctcgcagttgacgaacagaaacatgcaggcaaaccctgtggctacaaacctgatatccgccctcataaaggtactgcccagggtctgggcggaatggctgcccaaaagcacatggaatgtgaaccaggccagcaaagccaccaggcagagcccaatggacatctccttccagttcatctttttctgtttcatctctttcgccccctttccctgcctgttctctgtttaagctgtgtctattataccgtccatttcttaaaaacttatgattattttctgaatgtttttgtattttttatcacgttctgatggtcagagatcaaaaaaagccgccgcgcaatcaggattcgtctcctcctgcgcagcgaccctgccgctgtggtccagactgcccatcctctatttgaggcgcaccacatgctggcagtatatgtacatattcttgatttttttggcctgctgtccgtcgtctcccagcacgatgggctgtgttcccgtaggggttatgtagagcttaaaggcgatggcatcctgcccaatcttcatggaccttaccggcgcgtactgaaaattgccctgttggattcccagatattcatacatgctgtgctccaaatcaggattggcgtacacccgcaccacatctgcttctcctttcatgtcgatgattgccctggcttcctcaaatttgatgttcgtaaaacggtaatccccattaccgatgatataggccagcgtaccattatccagtaacagcaaaggatccgtctgtgccatgtaaatacccccttttcaaaaatcattcttaatatgtttcaccttaatcataaagcctgctgagaggaatgtcaatataatcagaaaattatcaatattgtttgtcaattaactatcaatttaagtgtttttccgaatactatttctcccggaaactacctacgccgctttccggtacagtccggcccatgggcacccgaaacgcaaaaaagattacaggattcatcccataatcttctctttccttatatcaaaaaatgtatgtgagcaggacgataagccgggttatgtcgttgaatggccatctatctaggactgccgtcgccggcagcctcaagcaacctacccggaagctgacgggcagccatatgcttcctgttcggtcttgcttcgagtggggtttacatgtgccccgcctgttaccagacgggcggtagtctcttacactgcccttccacccttacctttaaggccgcagccaaaaaggcggtacatttctgttgcactgtccctggagtcgcctccgccagacgttatctggcaccctgccctgtgaagcccggactttcctctcccgcggccttgcggtatcgcggcagcggccacctgtcctactcacaacgtgtattagtctatcacagaatcatgggtttgtccagagaaaccatgttgcttttccctacacctttccctgcaaaccatgttgcttttccctgtattccgacggcggacagcctgtgtatttcttaaaggcagtgctgaaataaggaatgttgctgtaaccggtcatcatggcaatctcgtaaatcttacggttgggatcgcgcatcagatccttcgccttttccatgcgcagcttcagaagataatcggtaaaggtcaccccggtctcactcttaaaggatgtgctgaacctggcactgctgagtcccgcggcaacagccgtgtcctccatggacaggtcagggctgctgtaattttcctccatataggcaagtgccttcaccaccggcctggaataaacgccggatttctggctgcccacatactcgcagatacgcttcaggttttcccccagcacgccaatggcctttccaatggtctcgcatccaatcagcttcttatattcttccaccggattctcaaacaccagatccgcgcatattcccgcatctcccagctccttaaggaccgtgctgtaaaggctgccgaccatgaactgcatatagatataagaatccatccctgcctgcttaagcagcttctccagctctcccatacgctttttgagaagctggacattgccgcttttcaccggggtgataaggtcgatatccagtatgggagacggatcgctctccttttcatcccccttgatatcctggaaacgcagattctggttgtcgcctctgatgtattttaatttaagggcctcatgtgcctcctggtaacactggtccagcagccggatgccccactgcacattgctctgcgcgcaggtcaggctcatcccctgttctgagaacaactgcctggtatggcttaaaaaaaggcttgcgcgcatttccactgtcatcctggtgggcgcaatgactgcaatctcacagaggttctccctctgcaccagcacataggcaccctgttccctcatatggccggcggcttccgccataagccggccgctgtcaacggattcaaagataaggaccatacagtagtcatgctccatctccgttatcagaccgctgtcgtttacctcatacatgagaagcttgcgcagcaaatcctccctgtcctcaaaggagtcctttctggcctcgtcgaaccgcctgacgcagtctgaagccagataggtcagctcatccatgttaatgggtttggtgagataatcctgaacccccagcttaagggcccttctggcatattcaaaatcatcataaccgctgaacacaatggccataagccccggattcagcttctttccctcctctatgagctgcagtccatccacatggggcatacggatgtctgtcatgagaagctccggccgctgttcctttaagagcgtcaggccttcctttccgtttccggctgttcccaccagctctatgcccagggatacccagtcaatgacgctgcacagcccctttaaaattatctcatcgtcatcacagataatcgctctcatcggatgcctcccccttttttcctatccgcagggtcaccacggtcccctcacccatggcggactctatggtcaccccatacttgccgccatatacaatttttatcttgtcgtttacattgcgcaccccgtaaccggtgccctgctggtccgaggatatggtatccagctccctgtttaagcgcctgcatgtgtcctcatccatccccatgcctgtatcctgcacctgcagaatgacatcgccttcctggggaaagatatggatataaatatatcccttctcctccatgggcttaattccgtgatagatggcattctccaccaccggctgtaatatgagtttgggcgtcctgcatgataaaatggacggatccacatggatgtcatagtcaaatttctcctggtaacgccggtgctggatgctcagatagcttttgatgtgctttacctcttcctctatggtgatgatatcccgtcccttgctgagacttatcttgaaaaagtctgtcagggctgtcagcatctctatgctctcctccacctgacgcattctcagcgaccagatgatggagtccagggtattgtacaggaaatggggattaatctgggcctgcagggcttttaattcctccctccgcaacttctcctgttcccggtatatggtgtcaatcaggtttctcatctctcctgtcatatggttgaaggaatcatacagcacccctatttcgtccccgcgctctgtttcaaccgatgtttccagattgccggcgcagacctgctccattgcctttaccagagtaaataagggcctggtaacggagtcagccactatttcggacagtatcatggatatgaccacggccagcgccaggagcataatcatgagcaccttgatatactccacggaccgggtaatggatgccttgggtataacgcccacgattttccagtccgtctgattcagggtctggtagaccaccagctgtcctttgtccttcagcacatgggatacgccgtattccggtatttcacttaaattttcctccaccatgcggcgcgccttctcaaccccatccctgtccttccatggtccttctcccgctgtcagattcatgatccggttccgttcatccatcagaaacacgtcccctgcgccgctgaccgccctggccgcaatgtcagacagcttatcggaatcaatatccgccaggaccacccccttggtccggcccgtggctttatcaataaaaggaattcccatggatacataggaggtatagggggtgctgaccacataggaattctcatggggcggaaaccattgggcctgtcccgtggcgtggatgattcggtaccagtccgtgtccctgggatccgacaccagaaaggatgaggaattgctcttatagcgccccccattatcccccagcacatatacgccaaagatgtcccggttataggagggaagcaccatcatctccatgcttccctccaaatcatgggaatacatctcctttatggagctaaactgacgtcttatgaacttctgcatgctgatattgtcattcatggcggaacatacctgaaaggtctggagaaacagttcattgatatcctggcatgcattgcccaccatctggacggtggtggcctccgcttcctcaaggattctggatgcggtcatataatagtggagggcgccggtcagcaccacaatgccggttgatgcggcagcaaaggaaagaatcatcttttcctttagcataaggcgcgcacccaggttccggcatgccttaaagcatgtccgcttattcagatacgccttcatggttttcttaatatgcatcttcaaacaactcctccgcgttatccatggtatattcccggtgtttcaccatggtctgccggtccgggttttcccccctctggtgcctgtttatgatatcaaataccgcatccccgtattccggactgctctttaccgtggccagatactcccgggcaatgatggccttaaacacatcctgtataccgcctatggacacaataaccacatcctcacccggttccatacccgccagcttaagggcctggaggacccccagcccatcctcgtcgctttgggcaaataccgcgttaaaatcaatatcctggtccgcaatcacggactctgtcaccttctgggccgtgagccggtttccgctgctctccacacgcttggaaacatataggttggagtgctcccttacgccgtgcatgaatcccatgtaccgctcccaatccatggccgaggacttttccccctgtatcaccatggtatggcagggctcaatgccgaaatgacgggcaaggatgtccgcacacagctctccctccgcataatagtccgaggcaacatagcccagtatgtaatcctcccggtcatactccggctccatctccacatcctgttctgccagtatcaccggcactcccctctgtctggcctccagaagtacctgatcatagccgtttctggcgctgggaatcaggataagataatcaatatccgcatccagaagaccatatatatcctcaatctgccactccaggctctcctcctctggcgcatggtaaatcagctgcgcccctcttcttctggccgcctccttaaagctcttaatctgagctgttttccagggcgtcagaggttccgcctgggataaccccactctcagtccctcatgctctgtctcctgtgcggccggaagggaccatctgtcctttaccagccataaaaggcatgcaagcatcactgcaaggcataccgcaatgattttctttctcatatgtcaatgcccctgtctcaattgaatcctattttgaatcctattataccagaaaagcacgcaaatagacagacaagataaaaggagggctgccggagaataacccctccggcagccttccttttgcatattctcttgcttttaatagaacaggttcaccagtccggtggagaacaacggaacataagccatcagcagcatacagataaacagcatgatatagaacggaatggattccttgataaacgcctttatcttacacctggtgatgccgcaggtgacaaatatcagggcacccatgggaggcgtcacgccgccgcaggccattgtgaatatatataccatggcaaagtggatggggtcgatgccgtaagcctcagccaccggagccagaaggggaaccagaacaataagggctgcatttccctcaatgaacatgcccaccacaatgaggaacaggataatgacaaagaggaacaggtatttattgtggatggttcccagcaccagcgccgtaaactgctgtggaatctgctccctggtcagaatccaggcaaaggcagaggcgccgccaacaatcagcatgatggatgccgtggtagccacggtctccttaagacccgtgccgatgtccttaagcttcagttccttatatactatgcccagcaccagggagtagacaatggccaccgcccctgcctccgtgggggtaaagattcccaaacggataccgccgatgatgatgacaggaaggcacagaggaaggaaggcactggcaatctcaggagcagcctgtttcatggtcagacgctctgtgcgcatgggcttatatcctctttttttggagataaagtgcaccagtatcatcatggcaacgcacagaagcacgcccggtccgatgcctgctataaacagctttccgatggaaatattggcaatggagccgtaaagaatcatggcaatccccggaggtatcaggggtgtaatcatggatgacatggctgtgaccacagtggagaactgcttggaatagccgtggcgctccatctcaggcaccagcatttttgcctccatggcagcgtcagccagattgcttcccgacagaccgcccatcagagtggacaacagcacatttacctgggccaggccgccggtcatgcgcccggtcatcacattacagaatcccataacccgcttggttacgcctgaataattcataaacacgcctgcacagataaaaaacggaatcgccagcagaggtatgctctctacgcctgccagaactctctggcccaatatctttgtaaagggacctcctgtcaggtaaaaatatgccatggaaccggaaagaatggagatgaacaccggaaccttcaggaacagcagcaccagaagaaccaccgtcgatatcaaaataatacttgtctccattatttacacttcctccccttttcctgttaaatccctgtatgtattcagacatacctgtaccgccatggtaagacatcctatgggcagcggcgcgtagataagactgtagggaatcttaagaatgtttgtcacacggtcgtagcgcaccatctgcatgatataccggactccctgatatcccacatagcagaggatgatgactgccgcagctgcaatcaacacgctcagtattttctgaagcttttccgggaacatctcaacaatcacgtcgatagccgcatggttcccgcacacaaatgcatacctgcctcccagaaataccacccatatgataagggccagctgcacttcctcctgccatacaaagggatctcccaggcaatagcgcatgatgaccccgaagaatgtgactcccaccagaagtaccagggccccgcaggctgccagcacatccgcgttgcggagcagattcccaatcttgttatctgatttcataaatatttacccctttcccggtaccttaatcctgtctgccgatgatggtcttcatctcttcaataagtccctcggaccacatggccttaagctgcggatcctcgtaaaatgcctggcctgccgccttgaaatcttccggcgtcagttcgcttaccgtcacacccgcatcctttaaagcttccagcgcttcctcatccgccttttccagctgctggctgttgaatacgccggcctgatctccgcactccatcagaatattctgctgctcctctgtcagtgtatggaagtaatccgcccccataatccagcaggtcatatcatatgtatgggcatccagcaccaggtttttggccacctcctggtatgcgccgtttaagataaccggaagagggttctctgccccgtctatggttccctgctgcagggccgtgtagatatcgctcatagccatcggtgtgggcgttgctcccagggactcaaacactttaatcagtatggtctggttgggaacacggatttttttgccctttaagtcgctgaccccattcaccggctttttagtgatggtgtggcggattccgtatctccatgtggtcagtatcttcagtcccacattctgttccagctcctctgccttgccctcaaaccaatcgctgtccaccaccttttccaggtcctcccatccctcaaacagatacggggcaaagagaacgccaaagtcctggattcccctgtcctggaaaaaagggccgttggccagggtgaccacgcagtccccgttcacagcctggtcgatgatattgtccttgcttcccagctggctggaaggatacaggtccactctcatggtgcctccgcttttctcctccaccagtctcttccattcatggcaggccaggtcaatgggttcccccggattgttctcatagccaatcatgatgcggactttcttaccgctgccctctgctgtctgaccgctgtccgtctggctgctgcatcctgccagggataaggccaatgtgcagcttaccagtaatgccagtaccttcttcattacttcccctcctgaattcttattccccgcggccgggccgccggatttatgtttcctcgtctttaatgcccttattatatcgttgggacaggtgttttgtacattcactctcattcctttttcttttaaaatctttccctcacagaattaaaactaaaataagcgcaaaacaggcgcaaaaaaagaccgtctcctgtaccgtgattgtaaggaaacggtctgtcttatctcagtgcctgtccgcggacatcacacgttcaggcagctcccgccgataaactccctgagaatggaattttttggaatatcctcgctgctgacgccgataaagtagtccaggaatttaaggagccgtttggcctccagccactcctcactgtcctttggaatggcaaagagcaggggctgggcgtactgcttcagcactgccagctcatagaccagggcagaattgaacatggcgtccgcctcctcctggaaggggaagatattctcctcctcacccctgcgcacagaaggccacatgcggatggtctcccgggccgaggagcctcttgtcctggcatcccgcaccattcttctcagaagccgcccgtctgtggtgggaatgcggttgtgctcgtcgatgttgagctgggtcagggcgctgatgtaaattttaaatttgctgtctgccggaagggtgtaggaaagcctgtcgttcagacagtggatcccctctatgaccaggatatccccctctcccagctggagaaaattccccttgtactccctgactccctttttaaagttataatagggaagctccacctgctttccctccaaaaggcctgtcatgtcacggttaaacagctctacatccaggcattccagaatctcataattgtaattgccgtgttcatccctggggctgtccacacggtttacaaaataattgtccactgcaatgggatggggctttaaaccgatggcctccagctggaccgacagacgatgggaaaatgtggtcttgcccgatgaggacggacccgcgatcatgacaaagcgggcgttcttcctggctgctatctgagccgctatctcagcaatcttcttttcctgaagggcttcctgtatcaaaatcaggtgggacatatccccctttgcaatcctgtcattcagggcgcccactgtctccagatccatccgccttccccactccgtggattcagacagggtggcgaacagcttatcgctgggcgtaaaccggtggaggacgtccggcgttttcctgtcaggcatcaccatcacaaacccgtagtggtagggaatcaggtcaaaatgcttgatgtagcctgtattctgcaccatatacccgtaataatagtcctcaaagccgtcaatgctgtagatattgacccgggataccatgcggtaacggaacagcctggccttgtcatacatccccagcttctcaaaaagctcaatggcatcgtccgtggatacgctgcgcttcataataggaatcttccgctccacgtactccctcatcttagcctttaccgcatccaggaattcctggttcaggacaaagtttccccgggcctccacaaagaatccccggccgatggaaaaatcgatcatcagcttttccacattgccggctcccgccacgctgtagaatgccttcagcatcataagggatgcactcctctgataggcggacattcccggcttatcctttgccgtgacaaaggacagctcgcagtcctttacctgtttatgcagctcctggagctttccatttacccgtaccaacagaatgtcatattcatactccttctggtgctcacgggccacctccatccatgtggtgccctccgggtattcctttgtgatgccgtgtatcttaaccagtgccattccacttacctccctcattttactgaaaccggttctcctgtcacacaatcatggctggccactggggcggcgcctgctccagctcaacctggcttcccagattcttcctgagaaactcagccatataggggatgaagatatgctccaggccatagtggcctccgtcgatgatggccatgcccctggctgccgcgtctatcccctgatggtggctgatatcccctgtcacaaggacctgggccccccaggccagggccccctctatttcgcttccccctgctcctgggcatacggatatacgggaaaccttctgatccataagttcgtccccgtatacaagggcaaagggaaggccgaatacatcctttacacggactgccagctcccttacagtcatttcctcctttaagaatccgcttttgccgatgccgtaggaaacagcaccctccgggccgctcatctcccccagtgcctccagaggaacacagccagccaggcccagccgttctgcggccaaatcagccatacagcccggggcggcatcaaagttggtgtgcatggcataataggaaatgtctgcctgtatcagtttaaccagccttctggtaatgaagttctggtcatttaccttcttgatggccttgaatatcaggggatggtgggtcaaaagcatatccgcccccaaagcctgtgcagcctccaccaccttgtccgtggcatccagggcaatgtatatcttttttacttccttgtcgcttctgcccgccagaaggccgggattatcccagtcacaggcgcagtcctccggcgccagtttcctgcatacgtccataatctcactgcatttcatcttgtgcctccttaatccaggacagttccttctgcctgcttattctggcctctgccctggtctctgtgtcggtaatcccatctttctcctgaaggctaaccaggattttctcaattctgagcatctccctgcccagatattccctcaggatcacatcctttttatcaatcagaatctttccgtaaaggtaatgggcctggctctcatactccatgaagccccttttcacgctcatcaccgtataatattttccctcgtcctttaccatggcttcatcctcaatggcaaaaccatgggcggccagataacgccttaccttatccaagtccgactgcggcgacaggacgtactgttttacgctgtcccacacatggcggccctcatccaggatttttataatcagctcaccgcccatgcctgcaatgataaccgtgtccgcctcacccggtttaagctcctttaaaccgtcactgagccttaaatgaatgggaaccgcccaaacatcctgcctgcgcgccctctcccgctcctcatattcccttacatgggcctgagccctctccagggggccggatcttacgtccatggccagggcagaggcaatacgccctgtctgggccaggtatacgggtatataaccgtggtccgtacccacatcggcaatacggctcccctgccttacaaaaccggctacggtcaaaaggcgggctgacagttttatggtccccgcctgttttcttttatctcttgtctctaacttgtcactattcatccagataatcctttaactttttacttctgctgggatggcgcagcttgcgcagggcctttgcctcaatctggcgtatcctctcccttgtcacattaaactgctttcccacttcctccagggtcctgggacgtccgtcatccaggccgaaccgcaggcgcagcaccttttgttcccgctctgtcagggtcagcagcacttccatcagctgttcatgaagaagggtaaaggctgccgcgtcctggggcaccagcacattgtcgtcctgtatgaagtctcccaggtggctgtcctcctcttccccgatgggggtctccagggacaccggctcctgggacatcttcatgatttcagatacccgctccaccggcaggtccagcctggccgcaatctcctccgtggttggctccctgcccaactcctgcaaaagctggcgggaggtgcgcaccaggcggttgatagtttccaccatatggaccggaatccgtatggtcctggcctggtccgcaatagccctggtaatggcctggcggatccaccatgtggcataggtgctgaacttataccccttggtataatcaaatttctccactgccttgataagccccaggtttccttcctggatcaggtctaaaaactgcatccccctgcccacataccgcttggcaatgctgaccaccaggcgcaggttggactctgccagccgtttcctggcttccgggtcgcccagctccatcttcttggccagctccacctcgtcctccatgcccaggagaggaatctttccaatctccttcagatacatgcgcacagggtcctccaggctgacgccttcgggaaccgacaggtccaggtgttccacatcaatttcttcctcttcatccagttccatttcctcctcgatgaaaaggtccgggtccagctcatcctctgttcccatgcggatgacatccaccttattctggtccaggaactcaaacagcctgtccaactggttggagacagggggctcctgaccgaaatagttcatgacctcctggtattccaatacatttttctttttcttggcttcctccagaagtcctgccagtttctcctcaaacacgtccgtcccttccataacttggtccatccttcctatgaaatgctgtcaatccagggagatgtgcagctgctttaaggctgcctgctgcctgataatctcctgtaactgggttatatcctttgcattgcggctggccacatccaggctgttctttctgaccttcatcacagtctccgaaaatgccttcttttgttcttcattgttcagggattcctttaaactggcgttaaacagggccgccacctccttgtactggtcctcatcattgataaaccggctgagtatggctgctgggtttaaattaccctccctgtgtccgtcaaataccatctgcgccacctgatgatacaaattctccacaaaatcatctgctgttatgatgccctctatcttctcaaacagggccggggtctctatgagccaggtgagaagcagtctctgggaacggcggattccatcctccttatccggccgcctgggtttacggctgccggaaagtccgctgccgccagattcctcctcctgtgtctcctggggcaccacacggccggaatggttcaggctttcacctgccttaagccccatggacatgcccatgcggtttaccaggcctctcagctcctcggccggaatcatctgctccctggccactgcctggaggtaattctcacgctccagggcctctccaaactggagaagcttcctggccgtctcctggtagaacctggtcttctgctccggatcatccatctcatatccccgccgcagtacatccacttcaaagagaaagctgtttttggcttccttgatccgctgccggaaagcctctgcccccatgttcttgatgaactcgtccgggtccttatagggcttcatgttcagtaccttgatggacatacccacttcctttaaaatgggaatggccctcagcgccgccttcaccccggccccgtcgctgtcataggtaaggattacctgatccgtgtaccgtttcagcacattggcgtgctggctggtaaaggcagtgcctaaggacgccactgcgttggtaaaacctgcctggtgcagggatatgacgtccaggtacccttcacaaatcagtagatatccttccctggaaagcctggcataattcaggccgtaaagattgcggctcttgtcaaaaagttttgtttccggggaattcaggtatttcggctccccgtcccccataacacggccgccgaaaccaatgacacggttgttcacatccatgatggggaacatgacgcggttccagaacttgtcccttccgccccgttcctccagcgtcaccaggcctgtatccttaagaaagctgtcctcatacccctttcccttcaggtagcggtacaaatcatcactggtcttattagaataccccagtccgaaatggacgatggtctcatccgccagccccctcttaagatggaaataatcataggctgccttgccctggggctgcttcatctgataatagaaatagttggccgccagcttgttcacttccagaagcctggccctcagatccgcctgctccctggcctcgcggctgtactccattttcggcaggttcacgccggccctgtcagccagggatgaaagggcctcctggaaggtataattttcatattccatcagaaaggtgatgacgttaccccctgccccgcagccaaagcaataatacatctgcttccccggcgatacggaaaaggacggggatttctcattgtggaaggggcacaggccgaaatagttggccccctttttctgcagtttcacatatcctgaaatcacgtccacgatgtcattcttcattctcacttcttctatgacttcatcgggatagtacatgcaataatctcccttctgtatcttttaatgccggctgtctatatacagccggattgtcagtacacgttccaccgctttggaacgaataattcctcaaactggtcaatggcatagatatcgctcatgccggcaatgtagtcgcacaccacccgggacttcttctcccccttgttgaccataagaagcacatactccaccggcagcttatccacatgccccatataatactcatagagctgggtaatcatgttctgggcctttccctcctccgccttgggtatatcgttcttgtatacattatcaaacatccatttgcgcaggccctgcatggcctcctccatcccctccgacatggtaatggcaggtttgtccatgctgttcagtatgatgtcgtgaatcatgttgttgaggcgttcccggacactgtggcccagcacatcggtataacccctgggcagctcatgctccgtgaacatcctggcccggatggcgtcgtctatatcgtggttgatataggctatcttatctgacagacggacaatggcgccctccagggtggaaggatgaccggaggtcctgtggttgcgtatgccgtcccgcacctcccaggtcaggttcaatcctctcccgtccttttccagcacttccacaatgcgcacgctctgctcatagtgggtgaatccgtcctcgcatatcttattcagtatgtattcgccggaatggccgaagggcgtgtgccccagatcatggcccagcgcaatggcctctgtcaggctctcattgagccgcagggtcttggctatggtgcgggctatctgggatacctccagggtatgggtgagcctggtcctgtaatggtccccctcaggcgccagaaacacctgtgtcttgtgcttcagccgtctaaatgccttggagtgaaggatgcggtccctgtcccgctggtactcaggccgcatatcgcacagctgctccggcttgtcccgtcccctggtcctgctgctaagggacgcataggggctcatgtacgattcttccaatgcttccagtgactccctgatattcatccatccactccctatctctattattatattgtcggattcctgtttttactacaaaaatttcaaatattgcgtaagcaaaagagcatcaggccggtaaacagctgcctaatgctcacattatatcataaattctaactatttcctagaggcagactgtccctcacacaaagggttccataccccagcctctcattgggccacacatcataccccggcagatgcctggcccctctggtaaaatacgcctttaccttctcgccgtacagaaagggatcgtttccctgcaatattccccactgcatcagcagggccgcgctgcctgtgacaaagggggctgcaaaggaggttcccgtcactgcctcgtatccgcctccccgcctggctgtgacaatatccaccccgggagctgccagatccggtttcacctggcctgtctggcgtgtgaaaccgcggccggaaaaatccgcgtaagcgcggtaagagtcatcgtaagctcccacggatatcacattggcagccgtggagggaatggtcagggtggtctccggaaccggccttaaaaagcgggtggacgggtttaaaatccccctggacggcagccacatatcgtaccgtccggtcacaatccgctccggtgtcagacggaaggtccagataccgctgtccagataatccctcacaggcagaaagtcaaaatatacctcctgggccctgctgaaggggctgggcttgccgtaataaatcaggatctgcgttcccccgtatcgcagggtctggggacccagcctgctgtcgatgggtccgataatctcccctgacggcgtaaccaggcggatggaaaactggtccacataggacttccacagctgtactcccatccctgtctcataaggcgcaatggacagctgcgcattttcctcctgtcccatgaccaggcttcctgccctgtgtccggccccggttccctcgttgcccgtgccggccacgatgacattcctcccaatgcctgacatgtcattgatgaaggtttccagcagactggtcccgtcatgggagccgtaggtatttccaaagcttatgttcacagccaagggccggttcatatcctgtgcccgccggaccaccaggtccagggccttcatcagctgggtggtacgcggaaagctgtccgtcaggggtgtccccagctttaccaccataagttcgctctcataggcaacaccgcggtaaacaccgtttccctccctgccgttgccggctgcaatggcagccaccgctgtcccgtgtccgctggggtcggtggaaggcaccagggccagggccgatgtccggcttccggtttccagggcggcgttgatctcctccctggtataaatccggtccctgtcctggtctgccagcagcccgatgcgggtggttccgtcgggatttctgaaatccggatgaaagtagtcaatgcctgagtcaatgacagccaccagcacgccctttcccgtgagaccggattccaggctgcttatgacgccggcccccgctccccctgtacccgcgcctccggcccctgccccgctgctggtctgaatcgtgcttagacaggaggctgcccttgccatgttactggcaaagaacagcctctttggtttctcgatgtatacaatttgctccatggcgctgacctgttctatccggctctccggcaccaccagaaccgcatatccggctgccagctcatccacccggatgccttcatcacgaagggattcgagtgatccgttgtacctgactataagctcccaggtcttttccccggggtcataccccacattcaggtttactgatttcagccgttcctcctccgtggcatccagggccaggttcagcagattttcccgtttctgattatccatatgggcgcacctcctctacccatatgtgtattcctatccccgcacaatagaataaatactggcaaatcccgtcaatgtaactgccgccaccagaatcggggtgagaaaacggatacagaatatccacagctttttaagcctgaaggtgacgccgtttttctccacctcgtccaccagataccggggattccatttccagccgataaaatagcacatggccaggccgccaaatggaaggaggatgttgtctgtcaccattcccacaaagtcaaatacgctgtaattgaggatagtcacattccccagggtgccgaaggacagggcgctgggaactcctgtcaggaaaatcaggagtcccaggatgaccgtagcctttttcctggtccacttaaggctgtccactgcaaaggagaccaccacctctaacagggcaatggcactggtcacagcagcaaacagcaccagcgcaaaaaacaggattgcaaagaccgaccctcctttaatggaggcaaacacctttggcagggtgccgaatataagccccggtccctgtcccggctccagaccaaaggaaaacactgccggaaagatggcgatacctgccatcactgcaatgatggtatccagtcccgccacgctggcgcagcttctgggtatattttccttatctcccagataacttccgtaggtaatggtaattcccatacagaggctcagcgaataaaatacctgtcccagggctgcgctgaccgccttcatattaaaggctgcgctgctgggaataaagatgaatttaagacccagaaccgcatccggcagggtcacgcttctcacgataattacaatcagcagcacaaaaagcaggggcatcatgatcctgctgacattctcgataccgctgataccgtgataacagacagccgttgtcataaagaggaacaggaaatgccagaacaccggctccgccggcgcgctgataaatgcctcaaaatcctccggtgcgtggaaggtggttccatagcttacaatatacttgatgatccagcctccaatgacactgtagtaggacagaatcaggaatgccgccgccactccgaatactccagcaatcctggcattggggtggatatccccgtatgcctgcacgggatcgtggcgtgtctttctgccaagcgacatctccagcatcatcaccggtacacccagaatgcagataaagaataaatataccaccaggaaggacgccccgccgtttcgtcccatgaggtaaggaaacttccacaggtttcccagtcctatggcagcccctgcggttgccatgataaatccaagtttactcgcccattgattcttagtcttcataccagtacctttccgtgtctctttttaatgaatatgaataacagtccgctgactcccatgaggatgggataaaagcagtagggaatgatttcaaagggagtcaggcctgtcaggctggctgccgccagaagctgggccccgtagggaatcaatccctgtcccatggagctgaacatgtccaaaagggacgcggagcgcctgggcgtcacgccgaagtcatcgctgatctcctttgcgataggaccagccatgacgatggccaccgtgttattggccgtacacatgtctaccagcagagccagggcagcgattccaagctctcctccccgttccccgttaattctctttttgatgaaggaaagaatgaaggcaatccctccgtactcctttaccagggcaacgatgcaggccacaatcacggatatcactgtgatatcatacatccccgtgattcccgctcccacatgggtgaacatttcccccaccccaaaggcacctgtggccactccggctatcaggctcagcacagtgccggtcatgagaaccagaaatacgttcacacctgccagggcacctgcaagcaccaccatataaggcaccacccgcagcaggctgtagtccaggctgccctgtatacggaacgaagcgtcctttcccagaaccagaaacaaaaggattgtgacaatagctgccggcaatacgatgagaaagttctctctgaacttatccttcatctcgcagccctgtgtctttaccgcagctatggttgtgtcggatatcatggacaggttgtccccgaacatggcgcctcccaccacggcgcctgcgcagactgccatggaaaacccggttttctggctgattcccaccgcaatgggtgccagggccgtgatggtacccaccgaggttcccatggatatggatatgaaacacccaatgagaaacagtcctgccacagccacgttggagggcaggatggacagccccagattgaccgtggaatccacgcctccggcagccttcacagcgcctgtaaaggcgcctgctgccagaaatataagacacatggtgatgatgttttcatcccccacgccttgtgcggccagcttaatcttttccgcaaagcccagctccctgttctgcacaaaggcagccagaagcgcaatcaaaaaggccacaatggccggcatactgtaaaaatccccggtaatgaacccggaacccaaaaaaatcagcagaaatatcagaataggaagaagggccgctgcccttccctcacgattttcccccatgtttttgtccccctgtatcaaatgctggcgtatctcccgtatcatatcccccggtacatacgcaagctgcggcctgttgggccgcagcagctttatccttgttcaattgttccatatactattttaagaagccgttgacaatctgggcttccgcctcttcctctgtaagacccagggtcatgagcttcacgatctgctctcctgcaatcttgcctatggctgcctcatgaatcagggccgcgtcaatgttgttggctatcagtcccggaatggcaaaaatcctggcatcgtccatgatgatagcgtcacattccgtgtggccgctacactttgcattgcccacgattttggaattgaaggtctgcttcgatgtatccttggcaacggagcgtgataccacatccgcgctggaatcctctccgttcagattcacaatgtaagtactctccgcattctggctgccgtgggtcagcagacgttccctcactatcagcttggctcccgcggccagctctgcacagttggtcctgttggtggaatccactccctcaatctggaccatctccatctccatgtagctgttttcctccatgtagacttccgtgcccggattcaggatacgctttccgttgccgtcgccctccccgtaatgcttttccacatattttactttggcattctttcccacaaagaaacggtggattccgtcatgctccgaatcctggtctccgcagttatgaataccgcagcctgccacgatgaccacatccgagtcctcaccgatgaagaaatcgttatagaccatctcctttaatccgctggcactgaccaccacgggaatgtgtacgctttcgttcctggtgccgggcttgatgcggatgtcgattcccggtttgtctgtctttgtggcaatgtctatattggccgtggtattgcggccggctgtctggccgttggcccttatattataggcccctgccggaacaccgtgaaggtcggccacttcctctaatattctctcctggatgctgtctgccatatcgctcactcctcccctcactgcgctgtctcataaaatttactgcaggcgtccactgcggacgcagtgcccatgatctggggcatgatttcatccctggtgccctggttcactacctttccgtccgcaatcaccacaatctcatccgcaatgttgaggatccgctcctgatgggatatgatcaggatggaaccgttggtgttctgcctcatgcgctcaaacacctgaatcaggttctggaagctccacagatcaatgcctgcctcaggctcgtcaaacacggaaagcttggaagccctggctataacagtggcaatctcgattctcttgagctcaccgccggacaggctggcgttgacctcgcggttgatgtagtccttggcgcaaagccccacctctgccaggtattgacaggcttctgataccgtcagcttcttcctggcggccaggcggagcaaatcaatgacctgcacgcccttaaagcggacaggctgctggaacgcaaagctgattcccaggttggccctgtctgtaatactcatatctgttatatcctgcccgtcaaagaggatgcgtcctcctgtgggccgctcaattcccatgattagtttagccgtggtggactttccgccgccgttggggcctgttatgaccacaaacttaccgtcgtccactgtaaagcttatatctttgatgatacctatttctcctttttcatcattcacatcaaaggagagattctctaaagtaagcatgatgttccttcctctcttcttttctttcacacactgtactgcttattttaagccacaacttacagtatataccatttcctactaaattactatcaaaactttacctcttatggtggaatttgtctgttgcaaatacatcagaaaccaccggattccaaaaaaataccgggaacgcaaaaacaggaagccattcagcttcctgttccatgaaccagtgcagaagatgggagtcgaacccacaaggtattactaccacacggacctgaaccgtgcgcgtctgccaattccgccacttctgcgttacgctgctctcgcaagcaacgtaggttattataaaggatgatttatgatttgtcaatcacttttcggcaaaatttttcaaaaaatacattcattggaagcggccgggaaaaatagtaaccctggcccagctcgcatcccatttcccggagcatcttaagctcctgggcggtctcgattccctcgcacagagaagtgaatcccattttgttggtcatctggatgagctggcccagaaattcccgtcctcttcctgtcttggtacaggactggacaaagccgcagtccagcttaatcacatccgtgggaatgtcggccatcatgttcataatggaataccctgacccaaaatcatctatggacgtgatgaacccttcctcctggagggtcttcatcacatggaaggttcgggcggaatcactgagaaaggcagtctctgtcaattcaaattccaggtattggtggtccaggccgcaggcccgggtaatctccaggatttgaggtatgagctgctctgacgcaatgtccacgcttgaaagattgacagatatgggaaggggctcccctccctgttccatccactggctcagctggctgcagaccgtcccgaacacataggtatccacctgggtgataaaaccatttttttcaaacagcgggatgaaatcccccggcggaacgattcttccgtcctcatgctgccagcgcaccagggcctctgcaccgacgatccccaaaccatccagtcccaccttgggctgtagatagaccttgaactcaccgtgtttcagcgcgtactccatgcggtttatgatttcattttcccggtaactgctgtcaaaggggccgtcattgaataccacggaggtggatcggataatatagtccactgatttcctggcaatagtggccctgtccaccgcggtctctatctcccggcagtccttttcaataaaatagatgccggaacggatcatcagatttatattggagtaaatttcattctccatccggcagaattcattgttcaggccctggaccatattcacaaaatcattgcggtccatcccgcacaccccgaagcttaagaactggtccgcactgacacgggtatagcagttggtctccagaccgttctgggtcagcatgtccccgaacatgcgcaggatattatctccctgggtataaccaatggcctcgttaatgaatttaaatcccttgatatcactggccaccagcacatactcttctttgccttcatccatcagcatctggcatgattccttaaaccggtcatacctcataagccccgtaagcgcatcgtgattccggtaatactccgcctcctgttttgcttcaatcagcatggatgtattcttgatgccggaggcgacgatacgggccatctcagaaacagcctcacactcagcacggctccactcacgttccgtttccgtgttcaccagaagtatcatgccgctgtacctgccctctataaatatacctgcagacagcatggtatgggcccctgccctgtccagaatccgcttcagccccgcattgtatgactcgtacaccctgcgcctcaggacagcaatcccgttcccgtcatagagatggtagaagatgtaaaactcctccctccggaagctgtccgtaggatcatacaataaagcggtcctgtcatccacccactgataagcggattgtttcccatggcctccctctccgttcatgtagagaacaatccggttcaggcggaaccggttgcccacaaatcccatcaggatatggattgcctcgtcaacggtggcggatttctcaaacacctccagggccacggccgtagtggtcttgtcatccaggctgctctgctcccggcgttttgcctccctggcctgtttcagataatcataggaaatgctgccattctccttgtcctccaccgcttcgtagaaaaggattcctccctttccggatttcttaacctgcaaaagggcctgatttgcctttacaatgatatcggaaaagttcctctctccctcaccagccaggcgaacgcccatactgcagctgatccgctcttttttgctgcccgtatccgacagtattccgcctatctccttctgaatggttctgcccgccgcagacgcgtcttccctgttggtattctttaaaagcacaagaaactcatccccgccgaagcgggcaatcaaatcaccttcccggcaggcctgcttcaggctgttggcaacattcatgagaaccacattgccaaaaagctttcccttctcctcattgattcttttaaaatcatccatgtccaggataaacagggccgtggtgtagggcgctggtcccgtttcaaggtattgctccgtctgctcctggaaagcccctgccgtcagcagattggtcagggcatcgaaggctcccttgctgctgcctcttacctttccagacgtctcctccagcacgttctccagtgttgcaagcctttgctccagtattctatgggccctgtcctttgtcaggaaaattcctataaccctggccacataggtcagcacctcaatctgttccctgctccactgccggttttcccggcactcgtcaaagcccacaaagcccaccatctgaccggagtcatagatgccgcactgcagcagggaacggaccccctgaggctctaatacctccctctggttcctgggaaggtggtcgatatccatgcaaaagaatacgccgtcctccccaaaattctccctgtatccatacgcgctccactcatatgacatatgctgcagcttatccttctggggttctatgccttcattacaccattcaaaggtattatccatagccagcccgtccaggcagtcctcaaaaatataagccctgctcacattaaactggagtccgataattttaaggatggtgttgatggcctcccgcaggtccgtggattcatataatgctttgaacacatagtggattaccttgtttgctacaaaataacggccattttcagaatctatcatagtgccgtccgtaaatcttcccagagcatgttttccgctgtccgcaggccttagggatggatcgtaaacaacgcagcggcccttaccccagttttttcctgcatagagagccatatccgctttcaggaacagctgctcgtatgtgctgccgtccgccggatacacagctgccccgatgctgcagctcagcttgcttccgctctttttcacagaaggaaggctggcaatgtcttctatgagctgcctcccgcgtttcataatttcttccctgcctgaaagctgttttgaaaataccaggaactcgtcaccgccaatccttcccaccatatcctggctgtcaaaaacgccggcaatgcacctggctgcctctgtcagtacgctgtctccaaagagatggcctttggtgtcgttaatctccttaaaattatccagatcaatgaccatcagtgttccgtccggcgctttgtccccatcctgcatataccggttgacagactgtacggcagcatccctgttaaacagtcctgtcagcgaatcccgcatggacttttcccagtactcctgcttctggttctgagcctctgtgtcatctatcatcacggcatggacccagttatttcccctttcgtcctccacaacgcggccgcggaagtccacccaacagatgcctccgttcctggatcggattctgaactgggcctttataatttccttaccctgatgcagctgctccagcacctcatccagaaccctggcatgatccctgacatccagcattcccttcagagtccctccggtcaattcttccagttcttttgtgtccgtgcagccaaaaagactcagaagttcatggttaactatgtccagccttctgtcttcgcccgcgcagcaacggaaaaaacctgccggcatggaatcattcagcaagataatctgttcattcatatatatgatgtccatcctttgtctctctgtcttcatacactccgcgcccctgattgtgcgcgttaaaggtatatgtcttgattatacttcactttccggggacttacaatataaagaaacaccataaaacttacaaccataaaactcagcaaaaaacaactgccggcaggtccaatttatcctgccggcagtcattcgcacatacacgattcaattatatcagctgtcttaagccctgagctcgattcccagcccgccaagtccgttgagtatcttgttcatcacagatgtgacttccttttcctccagggtgtggtccttggcccggaaggtaatggaatatgccaccgacttgtggcctgccagtacctgggctccctcgtacacatcaaagagcttgtagctttccaggacctttcctcccctctgctcaatcacatcctcaatctgtcccaccaggatatcctttggcaccaccatactgatgtccctggtcacagccgggaacctggctataccggtatacttgcggtcaaaggtggtgaaatccatgatggacggcatatcaatgacggcaatgtaagccctgtcgccaattttatagttatcagccacatccggatgtacctcgcccaggaagcctactactgcgccgtcatacaggatgtcggcctttcttccgggatgaaggtaaggatgctctgcactcggatcataatggggctttttatgcattccggccttttcaaagaattcttccaccacgcccttcatggtaaagaaatcgccgtccccgtacattcccagggtgaactgcatacgctcgtcaggaagctctgtgagaggcagtgacttgggacggtacacattggccagctcgtacaggcgcacgtccttgttgcggcggttatagttggttgacagggaggtcagcatgccgtttaaggaagtggtgcgcatgacgctgaaatcctctcccaggggattggaaatctccactgttttcctcagagcgctgtcctcaggaatcagcattctgtcaaataccttggggctttcaaaggaataggtcatgccctgggaaaaaccgcagaactccgctatctccctggccacctcctctatctgaagcttgtaggaaagctttcctgtggtggcttcgccggaaggcagtgtggtggggatcttgtcatagccgtagaacctggccacttcctcagccaaatcagccatgcgctccaggtcctggcgccaggtaggagcaatcacctcttttgtctcagggtcatagtccagttcaatggtcttaaagtaggaaagcatggtctcctcaggaatgtccgtgcctaaaagcctgtttatcttaacagcgtcaaaggggatccgcttactggtcctcttctcaggataaaggtcgatgatgccgcccacaacctctccagcccccagctcctcaatgagctggcaggccctgtttaccgcttcctccgctgtgttggggtccagccccttctcgtattttccggaagcatccgtgcgcagtcccaccttcttggcagacagacggatattggtgccgttgaagcaggctgactcaaataccatggtctgtacattatccgtgattttggaattctctccgcccatgatgcctgcgattcccacttccttttccccgtcattgatcatgaggatggtggaatccagctttctctcctgtccgtccagggtctggaatacatccccgtccttagcgcatttcaccacgatttcgcggcctgccagctggtcgtagtcaaaggcgtgcatgggctgtccgtactcttccatgacatagttggtgatgtccacaatattgttgatgggacggatgccgtttcccgccaaacggcgctgcatccactggggagaaggcgcaagctttatatttttaaccatcctggcgcagtaacggggacacagctcgctgttctccacccgcacattcagatagtcgtggatatcctcgccgttgcctgttggtgtgaccaccggggcatggaatgccttgccaaaggtggccgcggcctctctggctatgccaatcacactgtagcagtccacacggttggatgtaatttcatattcgaacaccacgtcccgcagtcccatgatttccactgcgtcggatccgggcacgctgtcccccggaaggatgtagataccgctctccggggcatccgggtacatatccctgctggctcccagttcctccacggaacacatcatgccgcaggactccacgcctcttagcttgccctgcttaatcctgattccttcctcaggaagggcgcctccgtcgtggcctcccgccacgcggcctccgtccagcaccacaggcaccttctcacctatggatttctccgtgatattgggggcgcctgtgacaatctgcaccggctcttccgctcccacgttgacctggcataccaccagtttatctgcatccggatggcccttgacctcaagaatctctccgacaacgattttttccaggttcttatccagacatgtataaccttctacctttgttcctgtgagcgtcatggcatccgtgtaatcctgggccgtaacatccaaatcagggacatatgcttttatccatgataatgctgtgttcatgtgttctctctccttctatgctgtgaatgtttatcagggcgcatgatcttagaactgtttcaggaaacggatatcgttttcatacagcagacgcatgtcgtcaatttcatatttaagcaaagcaatacgctccagtcccactccaaatgcgaatccagaatactcatccgggtcaataccgcacatctccagtacatgggggtgtaccataccgcatcccagaatctctatccagcccgaacccttgcagaaccggcagcccgaaccgccgcatttgaaacaggtcacatccacctcggcgctgggctcggtaaatgggaagtggtgggggcggaacttcacctttgtctcaggcccgaacagctctctggcgaattcagccagcgttcccttcaggtccgcaaaggtaatattcctgtcaatcacaaggccctcaatctgatggaaggagggggaatgggtggcatccacctcgtcggaacggaacacgcggcccggcgcaatcatgcggatgggaagcctgcccttctccatggtacgcacctgtaccggtgatgtctggctgcgcagcagaatgttttcattgatgtagaaggtatcctgctcgtccctggccgggtggcccttgggaatgttcagcttctcaaagttatacctgtcatattccacctcaggaccttccactacctcatatcccattcccacgaaaatacgctccacctcttccagggcaatggtattcggatggctgtggcccacattgttcttcctggccggaagggtgacgtcgatgacctcccgttttaactgctcctctctggctttcctggccaaggcagtcttagcttcctccagtcttccctcgataagcccccttacatcattgaccatctggcccacctttggccggtcctccggggcaacatccttcatgctctttaacaggttcgtcagttctcccttcttacccagataagatacacggatgtcattcagtctctccagcgcttcggaagattcaatctgccttaacgcctcttctttgattttctctaactgctctttcatggcttctccttttctttgtaaccagatagaatcctgctcccgggattgtccgtccgcgtcaggcattcctgaagctgcaatccccggggaacatttttgcttcatgggatccgcgttccaggaaacaaaaaagccccgtctcttcatcactgaagggacgagactgtaaactcgcggtaccaccctgcttcctgtatcaccccagaacctataactggagtatacagacacttgatgcacgtaacgtgtgcctgcgtcacagactaccggaatcctttcacggattggcgaaagcatccttttgcccgtacagctccggtgggaatttcaaccgtctatctgaacccgggcaggctttcagccggtggcctcccctctctgatggaaaataaacgtctactatgcaccttcatcgcttttgattatcaaatctaacctacattctagtcacattttctgaaaatgtcaagcggaaagccagaaaaacacatttgactttgaaaaaaagaaggggtaaagttatattcaggggccattttgtggcggtccttccaaaatacattacaaaagaaaggcatacccatatgattcatcgttatgaaactccctgtatggacctgcagcagattcatcagtccggccaatgtttccgcatggttcccctgccggaacatacatacccttcaggggcaaagaacggctaccggctcatcagcggcctccgcgtcctgcgcgcgtggcaggacggccctttcgtctgcctggactgtccccatgaggacctttccttctggctgtcctatctggacatggaccgggattaccaggctgtcatcgcctccattgaccgggaaaatacctacctgagggcagctgccatgagcgggacaggcatacgcatcctgcgccaggacccatgggagatgatcattaccttcgtgatctcccagcaaaagaccattcccaacatacgtcagctggtggaagccctcagcagccggtacggcacccttctggaagatagacagaaccgtgggaacggtgaggtccgggagaaagaaggtgcccggagggaaggtgctgccctggaagaaagtctcccgccggccttctcctttcctgcccccagccagctctgtcttgcttccctggaagatttaatggggcttaagctgggctaccgggccaagtacatccacaggctctgccaggacgcggtttcaggcaggctggacctttcccgtctggctgcccttaactatgaggaagccatggaatatctcaccggattttacggaatcggaaaaaaggtagccaactgtgtgtgtcttttcggccttcaccacatagacgcgtttccggtggatacatggatcgaaaaaatcctgatggagcagtattttgacagaaaaaaataccgccgcatccccaaaaaccgtctctgcgaaacaatcgtagaagatgtgttcgggcgatacagcggctgtgccggcatcatgcagcaatatattttttattacgagcgcagcgtcaggcagggaagggaatgagctgtgtcactccataagccgccccatagacgggcgcaggcgtccggccaccgtcactgcaagaatgcagagtatataatccggaatcatggtgggcaggcagtataccgcaaagatggcgccccatcccactgtgtcgggagtcaccaccacaaaatgggtgatgaagtaaaagtaaaggattcccattccgtaataaatcacataccccaccgtggcgctaaacaggcaggccccgggctttgaggcgtgcatccactccactatcttacccatcacataggctgccagagcaaatcccagcagaaacccaaaggtggggcgaatcagataagaaggtcctccgccccgcgcaaatacaggaattcccaccagtccaatcagcagataggtggacacactgaggaaggctcttctggagccaagcaaaaggcctgccagaagcacaaagaaccactgaagggtaaaattcatggtgtccgctcccaccggtatgacaatcttaataaaggcccccactgctgtcaacgccgtaaacagcccgcataccgtcaggtcccttgcaattccgtgccgctgcaccattgtacggcttcctgtgctgcttccctgtctcattcactccactccttctgtctcatcaaaatctgcctgccggacaaatcacatcatgcccagctcaaatatcttccatcgctcccgcagccctgcttccctgcccaccgcaaaatccctggtgaacgctccgtccccccactgaggggccttctgcagggccttgggagaccatttctgcgaaaaagagacccgtaccaccttatactcctcatatccgtaggaggccgccagctggtcgtaacgggctttctggtcctcatattcctcctgggacagggttttaaacccatggacaatgtactcctgtatataatatccgtctttaaaatcccggtcctcctgttcaaaattcagggcttccagctgatcttgcggaaacagcctgctgcacatgtcgaactggcccagacccttatacttataaaaccaggcagctgtcatctgaggcatgtccgcgggcatggattcaaatttaacatgcctgggaagcacatcgtcctgcaccgtatattcacttaccagcttttctccgccctttgccttgttggctgcagccaccccgaacatgatggccagacaaagcagtgtcagaccgcagattctgacggcctggggcgatatgttgcgtctgttcatattatgcaatcctttcatagccttttaacagctggcccgggacatttccctgtgttccatacagcacttgcgtattccctcggaagtattaaagaaccgtattccataggattttatcttgtccgtatccatggtcagatttctgggacaggaggcaaacctctcatcattgcgttttaatataccgccggaatcgcttcctgctaattccctgaggaacagcctggccgtgtcaaaggtgttgtaccggttctcacttccaaagttataaacacctccgggaagccccatggcctcctccagatggcgcaccacttcccacacataggtgattcccctgtaatcatggacaggaaactccacctcccgcctatcctttaacgcgtccgccagcttctgcaacagcccctggcccgccgctcttcccctggacggagcgtcatacatccaagtaagcctgagggccactgcatccggcaggtatgtgagcatggcttcctccgcccgtttcttgtcccttccatacacatttcccggctttccctcgctgccctcacggttgggctccatggaatgggatgtgttgtaaatctggtcggaactggtaaatatcatacggctgccggcgttcctgcatgccttggccaggttgatggttccccttacattgaccttctctgagaggaccggatttctttcacatgtacctgtgtttgaaattgccgcacagtgcaggacataatccggccggatagcctttataaaggcggaaaccgccacaaaatcctcaatatccagttccctgtgcgtcacccccactgcctcatatccgtccctgttactataatattcacaaatccgggaaccgagaaatcccccggcccctgttatcaataagcgtctgttcattctgtttttatgcctttctacagatatgataacattatagcccactaattcttacaattctttacggatttcttaatattttaacaggctcttctttaatatattatatcttccagggaaatcatctcatattccgtgctgtattcctcttgtgcaagacttctgtccctgtattccgcctcccctgtctgattgtcatagggatcgtttctcaaatgatccatgggcggctcaaactcatatccgaactctctggctgccggaagacggaagggatccagatttccaaagtaaaaatcccaccgctctgtctccccctcccggaaggccgctcctccgaaggaacagtccgcatagcgccagccatgggatggggtataaaactgcgcccagtcatggcagctgatttcaaggggtgatgtatagagtcctgcctgccatctggccggaatgcctgccgcacggcacagggtgatgaacaaaagcgcctgtacgccgcagtctcccttcatggatgaggccgcatactgcacaatgtcagtcagggtaaaataactccgcacaaatgaatacatcacatgggtggtgatatagtcatatatccttctggccttctttaaggggtccttttcctcccccacagtgtcagacgccagttcccgtatcaggggagtaaaccggatatggggcggctgctgcgccagccaggcatccatgggctctgcaaaaccatttgctccggttctctctttgatgcgttccgggccgccgtgttccaggctgccatgggagaagtccttgtatgcttcccggttctcaaaggaaaactccaccgaatatttctgccccttcctgtgttttgtatggaagcagatggtgcgctgaaaggcatccgggcgcgcaatggtatattcctgtgcctcggcttccctttccccgattcttacgctgtggattttcacattctttacctgggcgtattcaatcggcagaggaagatagaccttgatatcttcgccgtcccgctccgcttcctccagaatcccaagtgtgccgcggatacaaaacctgcatccggcgcctccccgttctttcatggacgcaatggttctgttaagaagcgcgaagttttcagccttagaccggaccagttccaggtccattgcccggttctcatattctttcctggtcttcaagacatttttcaggaagctgctccggaagcgcacctctccgtccacgtaaatccagtccgctgcatcctcctcccacagggtttccagctcactgtccttaaaatcccttacattgtcccgcagtatgccaagggcctctgcccatgtataggggtactgtcccggcatccgcttaagaatctccttttcaatcataaggcgctttctcaaagcctggggaatatccttttccagcctgctgtcaatcctgcggacagccctgtcaaactcccctctccactttaacttttctatatcttccggcagcacaaccgccagagaatcaaaataactgttatccatctgaatctccccttccattttccctgctgtggcttttccctgttacggcctctttccccgccatagcctttctctatcataccctttttttgcccattgtacaataccattgcaccataccgggaatggacgcaaaaagcccggacaggctctctgtgccgtctgtccgggcttatgcttttccgttctatttgaatatgcccttcttcttaggcttctcttcctccggtgatgcgacgccgttcatcgcatcgtcaaaccgccttaaggcatctttctgcgcctggttcatacgctccggcacctgaaccaccaaagtaacatagtggtcgcccctgacactgcggctgcgcagcgagggaacaccttttccctttaagcgcaccttggtatctgtctgggtgcccggccttacatcgtactccacttcgccgtccactgtttttatgcggatagggcctcccagggctgcccgggcaaaggatatgggcaccgtggaataaatactggtatcctggcgcttgaatatgggatgctgggaaacaactgcctccaccagcaaatcaccgcgctcaccgccgccagtgccgggctcgccgccccctgccagacgcacgcactggccgttgtcaatgcctgccggaatggataccttgaatttcttgcgcactgttttataacctgtaccataacagtcaggacacttttccttgataacctgtccggtaccattacagtcaggacatgtctgcacattctgtacagtaccgaaaaaggactgctgggtgtacatgattttaccctttccattacacttggaacaggtctgaggggaagtgcctgccttagcgcctgtgccgtgacagctggcacaggtttctttaaaattaatctcgatctctttatcacagccaaatacagcttcctcaaatgtaatcctaacagaagtctttatgttggcgccccgtgatggtccgcttctggccctcccggacctgccgccgccaaaaatatcaccaaaaatatcaccgaagatatcgcccatatccccgccaaaatcaaagccgccgaagccgccaccaaagccgcctgcccctgcgcctccctgttcaaatgcagcatggccgaactggtcgtactgctgacgtttctgagggtcgcttaacacgctgtatgcctcggaagcttctttaaacttggcctctgcctctttatcgcctgggttggcatcggggtggtatttcttggcaagtttcctgtatgcttttttcaatgcatcctcatctgcatctttgggaacgcccagaacttcatagtaatctctcttactctctgccatgttgtttacctcttaatctatctgaacgccgcaaaactggccctgacaggcagtttcaaaagcactctttatcagccacaaagggggtagtggccggtttcccggctcctaagccccctgtttgttttatccggatttatttcctggatttattttacttccctggatttatacttccttgaaatctgcgtccacaacgtcatcgccgcctgctgcgtttccggcgccgcccatgtcaggacctgcctggcctgctgcaccggaggcctgagcctgctcataaacctttgcaaacagcttctgagcgctgttcatcagcttctctctgccggccttgatgtcctctacctgtgcgtctgtcatctcctcaaccggagcgcggttgatggcttccttcagtgaattaaggtcagcttccacttctgccttgtcgccaggagcaatcttatccccaacctcttccagggccttctcggtctggaataccatggagtccgcatcattccttgcgtcaatggcttccttgcgcttcttgtcctgtgcctcgtactcagctgcttctttcactgccttatcaatatcatcgtctgacatattggaaccggaggtaatggtgatgtgctgctccttacctgttcccagatcctttgcggatacgttaacaataccgttggcatcaatgtcaaaggtaacctcaatctgcggaattcctcttcttgcaggcggaattccatccaggcggaactgtcccagtgtcttgttatcccttgcaaactggcgctcgccctgtaccacatggatatccacggctgtctggttgtcggcagcggttgagaatatctggctcttcttggtaggaatggtggtattcctctcaatcagtctggtagccacgccgcccatggtctcgatggacagggagagaggcgttacatccagaagaaggatgtctcctgcacctgcatcgccggccagcttgccgccctgaatggcagcgccgatggccacgcactcatccgggttcagggtcttgctgggttccttgcctgtcagctgtttaaccttttcctgtgcagctatcatacgtgtggaaccgcctaccaacagcaccttgcctaactcagaagcagtgatgcctgcatccttaagcgcattctgtaccgggatagcagtgcgctctaccaggtcgtgggtcagttcgtcaaacttagccctggtcaggttcatatccagatgctttggtccctcggcagttgcagtgataaagggaagattgatattggttgtggtagctgtggacagctccttctttgccttctcagctgcttccttcagtctctggagagccatcttgtcattggacagatccacgccctcagctttcttgaactcggaaatcatccagtttgtaattgcgttgtcaaagtcatcgccgcccagacgggtatcgccgttggtagacagaacctcaattacgccgtcgccgatttcgataatggaaacatcaaaggtaccgccgcctaagtcgtataccatgatcttctgttctttttcattgtcaagtccgtaagccagggctgctgccgtaggctcgttgatgatacgctttacatccaggcctgcaatcttgcctgcatccttggtagcctggcgctgggcatcattaaaatatgccggaaccgtgataactgcctctgtcacagtctcacccagatagctctctgcgtcagctttcagcttctgcagaatcatggcggaaatctcctgtggagtgtacttctttccgtcgatgtctaccctgtagtccgtgcccatgtggcgcttgatggaagagatggtcttatctgcgttggtaactgcctgacgctttgcaggctcgccaatcagcctctctcctgtctttgtgaatgccacaacggatggtgttgtccttacgccttccgcgttggcaataacagttggttttccgccttccataacagccacacagctgtttgtcgtacctaagtcaatacctataatcttgctcatagtcttttcctcctgattattttatgagaatttaagtaaatatccaatgtcaatttgccacttttaccatactgtgtctgaccacgctgtccctgtacatataacccttctgcaattcctccgccactatgttctctcccaggctttcatcatccacatgcatcactgcgttgtggtagttggggtcaaactcctggcctactgcttcaatggctttcacgccggcttcctccagtgttttccggaactgcttatatatcttctccataccctctgcaaggggtgttccctttgcatcctcaggcacggttgccaggcctctctcaaagttgtcaatgacgggaaggattctctctatgatgtccttggctcccatctcatacatggcggacttttccttgtctgtccgcttgcggaaattctcaaattccgccatctgacgtttcacccggtcggtgagatcttctatcttttcatccctggggtctttcttcttcttaaaaaatccctttttttcttccttttcagcggcaggcgcctgctctgtatcttcctctgcgccttccggcacatcttctgccgtctctccggcctcagcggcagcctctgtattccctgcctccccggatccggcctcagaagtctgttctgttcccgcttcctgctctgtattcagggcctcgtcttccttttttaacgcttcgtctttcatatcttcactcacagcttatcacctttcatcttttttaaatgctgtatccagctgattcatcagattgcgcagagtcccaagaaccttttcataatccattcgcttgggccctataataccgatggttccccgaaggcctcctcccaaatcataattggcagtgaccacactgcagtccttcatggactgcaccgggctctcatcaccgatataaacctgaatgcctgcttcttcctctgtaccggaattgacttccgccacaaattcctgcagcacttctttatgttccagtgtatcaatgagccggctggccttgtcgccgtccgaaagctcagggtacttgaaaatgttggtggctccgctggtataaatctgcaggtcctcttcccctgccttgatggcctccgccacctcgttaagtaccagatccaccacctggctgtggatgcctgcatcgccctttagcttgctgataacatccagattgatatcctctatggtcagcccgttcaggctgctgttaagcaggatgttcaggttaaggagctcctcgtcgctgagattatcctcaatatcaatcatggtgttcttaatgatattgccttccaccaccacaaccaccagaagcttatgcttctccatcttagaaagctggatgaacttaagctttgtcttgtgataactggggccgctgatcatggtcgcatagttggtattagctgccagcacctgagccatcttctttaggaccagttccagcttatcaaccttttggaccatcatctccttgaactcggttacctcgctctccttatccagcataatctggtccacgtagaaccggtaccctttgtcggaaggaatacgtcccgctgaggtatggggctgaacgatataccccatctcttccaggtctgacatctcatttcggatggtggcagagctgagcttaaggtctgaatacttggaaatggtcctggagcccaccggctctccggtttccaggtatgtcttgatgatggcctttaatatagtcaccttcctgtcgtccaggagtgcatccaatggcatctgctcaccttcctttcttttattattagcactcaacgttcgggagtgctaacatctacattccataatatattccttctggagtcatttgtcaagagataaatccaaattcttttcatattatttaaggcctcccgtttcctgccggcacatcatgtgccatttccctctcagtatcaactaaatattggaattcatcctccactttttacataaacactccaaattcaaggctttttctctccactttttatactcttgtaacacttgcttaattattttaacttgacaagtaacatttttgtaatataatgaaggtacaactttataagccatataaaaccataacaatatgataagattgcgaggtcgttgtatgcattactttaagaaaacccttctggccgcagccatggctgcattcagcctcacggtggcttttccggcatttgcggacgagcctgtgggaacggatgtgaccgtagtggaggccggtgcatcagatacgtctgaggactcgtcccaggaaatccaggaaacttccgcttcccgggaatccaaaggccgcagagccgctgtaatgaatgaagaagaatacatagcccagggaccaggcgcccaaaaggaggagaaggaggaagctccggcccccaaggagacatcacttggacgctttaccattacaggatactgcggctgcgaacagtgctccggcggtcataatcttaccttttcaggtacggttcccactccaaaccatactatttccgctgatttagattattttccccttggcaccaggctgaaagttgacggtactgtctacacggtggaggacaaaggttcttctgtaaacggtaatattctcgatattttctacggctcccatgaggaggccctggccaaaggtacatacactgcagaggtatttttagtgcaggattgatgcatgatgtaaggaaaaaactaccaggcatatgagcctggtaattttttgcctttctccggaaaagatagcgcagggacagaaattattaccaaaattcagctgtatatggataaaagtggtgttatttccatatttttccttgacaacaggaagaaaatatgataaaaacttgtttattgctcatatattacaaaagtattacatattatttattaatgtgttaaaaatctttttctaattattacttgagcaataggaggtattacaccatgaaattaagacacttactgaccggaaccattcttaccgtcagcctgcttgcggccactgccatcacagcccttgcagcagcgccaaagggaaggttcgaaacagtgaacagcaccaccatcagcggctgggcttacaacagcagtacgcctgatgatgcgcttaacgtacggatatccgtcaaagataaaaatacaggtgaggaagttttttcccagaggatgacagccggggaatacagcgacaagctttacggcagcggaaagggaaatggctgtcacgcctttaccctcaatatggactggagcgcgctgcccgatggcgtttatctggtggaaggctatgtgggagacaatgatttttccaaccccagaacctataccaacggcaaccctgacgccaaacaggaaacccctgctgcccaggcccagaacctggttcccctgggcgtgttcaagacaacagggtattgcccgtgcagggcctgctccgagggctggggacgccatacctgcaccggcgcagtggccacggccggccacaccattgccgttgacccgcgggtaattccctacggttccaaggtgatgattaacggtgttgtctacacagcggaggaccgcggcggagctgtcagaggcaatcacatcgacatcttcttcaacacccatgccgagacacgccagcacggcacccagagcgcagaggtctatctggttcaatcataaagaacaacccggcaaaagcccataaaggcttttccgggttgttctttttccggtttatagttttcacgttcagacaggctctaaccctcattgcactcccgcagttccgtaccatggtagaaaaagtccaatatctgcttgtagccctttcctgtctttgccattccctgggcgccgttctggctcatgcccacaccatggccaaaaccgcctccatatatatggaaggaaaggcttccgtcctcccctgtcctcttctcaatggcgataaaggcgctgggaagggtggcgcttccggtcatggtgcccccgtccttcttggtgatgatcagggacgggtttcccagtgcagatcggatggcagactgtcctttgatggtcacggtgccgtcagaccctgtgactgtaagctcgcccgctatgccccccggacctctgtctgtgacggtcatatcctgtatctggcccgccccgctgatctgggcggaagccacatcggccggaagatctgtctgccagcggaacatggggtaggaggtgtcataggcaatcacatcctccctcttgatataggattcaaagccatcgttgtcctccttgcacaggctctttcctccctcttttacctccacggctctcagataggggtattttccgctgtcagtgccccatacgcctgcatctgccgtgcgtccgcaggaggtggagaaataaaaggcctcaatgggtttatcctcatagaacagcatctttccgtaagtctcctttacagcctgggtggacttatcattggcagaagtattattatagacctggaaatttgtgctgtcatccacatgggcgccatactggctgtaggtatttccctggatctggcggtaggcataggtcctggcgcacacggcctgggccttcagggcttccttctcataggacggcggcatttcgctgggcactacctttgtcaggtaatcctccaaaaacaaatcattgacaagaaccaacccctccggtgttcccttgatttccaggcttccgctgtaaaccggcgtgccctggctccgctcaatggatcggatagtgattgcctccggctcatccggcgtaatgatcatacgcccatattccagataagggctgtcaggaccaaccgtaagctgcgtgcctgcctccaggcgctctcccaccatctttcccttggcattctcatattccaaatcagcgccgcttcccagcaccagatccgcagatgcgtggaacacactcttaaagccggtgtccatcagaaggacgcggatggtcttggcgtcaaattccctttctaaaagggccgcgcacagctttccgtctgctgccacaaattcctgaaggttatagccaaccagtatgtccgacgcattcagcaccttaaaatcaccgtataccttatatacatgaaaattaggagccagaggaatctcgccataaccttctatctcaatggcatcctctgttacggacagcaccttgccgcttaacctgtcccttttcatagtgattttgaccagcttgccgtcctccatgtgcaggtcagccagattcccggccatcccgtcctccccgccaagcttggcgctcaccgggaattcccggtaggccgtacccagatacgccttaaaatgcctgccgtcgctttcagccagccagacattctcatagaccacgtttctggacacaaggctggatgtaatcatctccccgctcctggccagaaaccgtatctcacagtccaggaacgcgtccagggcaagtccctggaatccaaagttgccaaccgtggtataggcggtccaactctcagcctggtcaagattggacggggtgccgtagagcacggcctccatctcctccaccttcccctccggatcagtctccttcagaatggaaccgtacagctgccaccagtcctcttccggaaatgcctggtcccggttgtttctggtggaaccggcctgaagcttcagcttgccggacacctggccggccatgtatgcagcctccgcgtatgtaagatatccctgggctgaggccagggaagccggcgtaagctccgggtccagatagccctcgtcgtagagataatccatgtatttgacaaaccagttgtccttttcttttgcggaaaaatgggaggttccccgctccttggccctcttttcacactcttccttgtccgtaagggccagagccatggccttcattgcctgtgcccttatgattccgtccctgggcggctccagctttactattatcaccatcagcgtgaccaccaccagcaccacgccgcttacccatgcaatcatcctgttcttcatattcggtccagctcctgtaaacgaagtaaagcagcggggtaaccgctgcttttatcatgtgtaaccccagaatgccgtctcttacttattgacgcctagcaatgctaggtgggcaacctcacttaaacatctgccttccactctacggaggcctgacatccgcttaaaaatattggaatcccttttgtctaatgtaggttcaaaattggtaagagtatcgaacaccccaggaaattacagttccacttcttttatctggtgttattataccccaaagacttgggtttttcaagttgatttttctgaacatttatggaattttttcctcaatggtccttctttccacacccgcgtcagaaatccttgcaaatataaggggctccggttccggcatctgtttccccagggtgcaggaagccagaaatttttccattgccggtccaaacagttcctcatgagaggcgtaaaggactgctatggtctctccctctctcacactgtctccatattttttctccagaaggatgcctgcgctgtaatcaatggtatcctcctttttattcctgcctgcccccagcatcacagaggccactccgattccctctgtatccatatgggtgataaagccggtctcagaagccttcacttcccggctgagaggcgccttatgaaacagtccaggattttccacgtaacggccatccccgccctggctctcaaccatggatttaaggcatttaagggcgctcccatcctccatggcgccttgggcaatcttcctgcactgttccatatcccccctgcctgccatgtgaagcatattggcagccagttccaggcatacgcaggtcaaatcctctggtccgcggcccttcagggtctcaatggcttcttccatctccagggaattgccgatggcatggcccagaggtacgtccatattggtgatgagggcacagcagcgccggccggccagggttccgatggaaaccatctcccgggccaggctgatggagtcctccagggttttcataaaggcgccgcttcccgtctttacgtccaggacaatgcagtcgctgccggccgccagttttttgctcatgatggaggaggcaataaggggaatactgtccacggtggccgtcacatccctcagggcataaagctttttatctgccggaaccatgttgcccgactgaccgataagagccaggccgttttcattgacaatgcggaagaattcttcccttggtatggcagtcttaaacccgggaatactctccagcttatcaacggtcccgccggtatgtcccaggccccgtccgctcatcttggccaccttgacgccgcaggcagccacaatggggcctgtcaccagggttgtcttatcccccacgccgccggtgctgtgtttatccgccttgattccctcaataggcgacaaatccaccatgtccccggaatgcgccatctccagggtcaggtccgttatctcccggtcatccatgcccttaaaataaacagccatcagcatggccgacatctgataatcaggaatgtctcctgccacgaatccgcgcaccatataggcaatctcctccgtcaaaagggaaccgccccgctttttcttttcgatcaggtcatacattctcatatcacgcacctcccaagtggtcaggtccaaagctctccggaagcagctgggccagggtatattccctgtattcctccgcgcttttagccaggataatgcaaaatgagtccggattgcagaactcccgcatgacctgccggcacacgccgcagggcgggcagtaatcccctgcttttccgtctggacctccgcatatgacaatggcctcaaactccctctcgccctcgctcaccgcctttgcaaaagcgcaccgctccgcacagatgccgggactgtaggctgcattctcaatgttgttgcctgtgtacaccttcccatccctgcaaagcagggctgccgatacatgaaaatgggaatacggtgcataggagcgcccaagaccgtccagggctgtctgtatcaataattctctctccaaattccccctcctccttctgcccgggccagggaccggaccttcggatactgcctccagcccggccccggcctgttgttctgctaccattataatataagccagccccttaaacaagggaaacaaactgcccctgcaaatagcttctcaaatcctccggggacagggtgacctgcacgcctctctggcctgcgctgaccatgatggtgtcgtatagctgagccatttcttctatataagtagggaaatgtttcttcataccgatgggagaacagcccccgcggatgtagccggtaatatcaaacatatcctttacgtgaatcatctccaccttcttctcccccgctgccctggcagccttcttaaggtccagctcctcatccacaggaatgcagcacaccagatatccttttttctcacctttcagcaccagggtcttatacatcctgtcgtggtccacccccataaggtctgcggcgtggctgccggaaaggtcgttttcatccacttcataggtacctgtttcatacactatacgggctgcgtccagaagacgcattacatttgtcttaaccataccaaacactccttttaaccggcccgcttttccctgcggaccatgtttcaggaatatcatactcttttttccgctgcccgtcaatcaaacccaaaacagcctcccttaaacgtttaaaagaaagtggaatggagtattcacaaagtaatattatacggttataatgggaaataaatacgcaaacggcaggaaaggaaatctcatatatggaaaagaatgatatcatcatcatacacggaacagattacaagaacatggccaagcgggtcctggaacaggccggcgtggcggcagacatcggtgatgtgaataaaaagattgcattaaaacccaatctggtaactgccaaggcgccctccagcggagccaccacccacagtgagctgctggccggtgtcatagaatacctccgggaacacggctttcaaaacatcaccatcatggagggttcctgggttggcgaccacacggaagacgctttccaggccgcgggataccatcaggtttgcagccggtacagcgtccccttcgtggacctgcagcgcgatacctggaaggaatacgatgcagcaggcatgaaaatcaagctgtgcgataaagcagctgccgtggattatatgattaatatgccggtgctgaagggacactgccaaaccaccgtaacctgtgccctgaaaaacaacaagggtgtgattcccaattcagaaaaacgccgcttccacaccctggggcttcacaagcccattgcccacttaaacaccattgcccgcagtgacttcatcctggtggacaatatctgcggtgatttggattttgaggagggaggcaatcccgtggtcatgaaccgtgtgctgggctttaaagatccggtgctctgcgatgcctttgtatgcgactgcatgggttattcagtggacgacgtgccttacataaccatggccgaaaaactgggggtgggaagcacggacacagcccatgccaacatgatctatctgaaccaggccacggaggccgacagtaaattccgcatgaccaggcgcgtacagcacctggctgcctacacggccccggaagacgcgtgcagtgcctgctacggctcccttatatatgccctggaccgcctgaacgacatggggtatctgaggaagggcctgcctcctgtatgcatcggccagggctacaaggggcaggatggcgccatcggcgtgggacaatgtacctcctgctttgccaaaaccctgggcggctgtccccctaaagcagcggatatcgtagactttttgagcacccaatggaaataagcccgtttccttaaagtccccgctgcctgagccaggccatgatatgggccccgtatgccttttctttcttgaggagggtaaaatggtccgcccctttgacaaacaccacctttgaatcgggaatctgttctcccatccacagagagtggcgggggcggatcatgtccctgcggcccgtaagaatcaggacaggcgcctggatacaggacagcttatccttgtccagcctgggccatctggccataaggcctaacagctggcggcttttcacagccctttccctgacgccccggggcagcggcaccttttccagaccgcgccaaagggcgtattttaatttcacctccataagcgaggctgcgctcatgcctctgggcagggcatttccgctgaccgccaccacggcggacacacgccccggatagcagctggctgtctccagggccacatttgcaccgtcgctgaagcccagtatcaccgccctgggcacatggaggaattccatgacctggaccacatccgccgccatatccgggatggtcagatctcctccggccgcctcctctttcataagagaggacccgtggcccctgctgtccatgagaatcaccctgtaataccggctcatgagctcagacagcctggcaaatatttcgtggctctcaccattgccgtggagcatgatgagaggcataccctgtcccatttccttataataaagagacgcaaaacggttgtccacatatccttccttcatcggctcagcctccttcctgttgaccttcaccatatcacacctccggtaaaatgtaaatacaggcacagcccggcagatagaagtcctgccgggctgtagtcatacgggactgtaagtcccgctcttatcttctgttagtattggctttttccacgtgaatattctttcccttgatcttggcatgggccatggccttcagcacatcgtccgcatagcgtccgggcacatccacgaaggtatatccgtcatacatgtcaatgcttcccaccatgcgtcccggaattcccgactctccggcaactgctcccagaatgtctcctggggtgattctctgggccttgccgatgttgatgaacagtcttgccatcttctcatccccttcgcccagcacgtaatccacagcagcgcggtctgttgctcccttgcgtcggtttccgtaggcgctgcgctcgcggcctctgccgcggctgcttccacgtccaaagctgtccagttcatccagggaacgggctgtctcaaagctgtcgatgatgtcttcgctctcatctcccatgctcatcttgagaagggcagctgacaaatccatggaggtgtaatcctcctccattaacttcttctcaataatgttcaccatcttggtcaggtctgtgtcatttaacacctcctgaacctggtccagaatcttctccaccttgatttccgtgatatcatttagagacggaatggcctggggaatgattttagtcttgcagtaacgctggatatccctgagcttatagacctccttgcccataacaaggctgaatgcctttccttcccttcccgctctgccggtacggccgatacggtgcacgtagtactcgtcatcctggggaatgtcatagttgaacactgcttccacatcccctacatctatacctcttgcagccacatccgtggccaccagaatgtcggtgcggccattgcggaagctgtccatgacacggtcacgctggacctgcttcaaatctccatgaaggccttccgcaaaataacctcttccctggagctcctgcaccaggtcatccacctgacgctttgtattgcagaacacgatggaaagcttcggcgcatacatatccagcagacggctcataacctccaccttattcttcggcttaacctcataataatactgggtcaccttaggcacggtcagttccttcttaatcacccggaccgtcaccgggtccttctggaacttcctggcaatctccgcaatggcctggggcatggtagctgagaacatcagggtctggcgctcctcaggcagctggcttaaaatagtctccatatcctccaggaaacccatgttcagcatctcatccgcttcatccagcactacggtgaggacatggtccacctttacagtctttcttctcatatggtccatgacacggcccggggttcccacgataacctgtgttccgtcctttaaagaacggatctgctttacgatatcctggccgccgtatataggcagcaccttcacaccgtgcatgaactttgcaaaacggcgcatttcctccgccacctggatggccagctccctggtaggaagcagcacgatagcctgaagcttcttcaccttcgggtccaccttctgaagaagaggcagaccaaatgcagctgtcttgcctgttccggtctgtgcctggccaatcatgtcacggccttccatggctaccggaatggcctgagcctgaatcggtgatgcctcctcaaatcccatctctgtgatggcgcggataatccgctcgtctaattgtaactcgtcaaacttaactgtctccatataaagttaatatcctttcttcctctgccgtcccatataaaagagcctccggcaggccgccttgtgcatattccctgactccgctgccacgcatccgtctgcctgtttccaggacatttcccccggacccccaagcaggccttccaaagcccccggccagataccgaaccggctacgcatacgtcataccatgcaccgcaatttattagtttcttcgtgaaacgaagtcctccacgcgaacaaaaaaacgaggggtaaacaggcacgtctcgggcctttcatcctctcgcttcgtacggttattaactataacagatataaaagtcagtgtcaatggaggggttatagatttttatatcaatttcagggccggttcccgtgaaaatgcccgaatgaagcatttttcacggtcccggcctgattttttcatgaatttaccagactttcgcaggattaaagcagctgttttcacacaatttctcattcaattaaggactttgcgtatctgcggaagcattttcctggtgtactcatacccccgttccatacattcccccatcagttcaaaggtcagaaggcctgccttggagcttaagggcggcttcagcagcagcacctcacctgtggaggcgcagtccttcagccggccgctcataatggaaaaggagtgggaagccacctccataacgctgtggtccgaaggcgcttcgtaatcccctccgatgtccactgccagcacatcccggataccggctgcctgcagaaggttgaccgggagaatatccgtaacgccaccgtccaccagaaaataccgtcccaattttctgggcgcaaatatggcaggcacgctggctccggccatcatggcttcacagagatatccgttccactcccatgtcacgtgctccatctcccttacctggtcgctgtttgtaaagcagatggtatttccgctaatcaggtccactgccggtatgactaacttaaacacagcctcgtccatatgcttcctgccggtcatctgaaaaaaatagtcctgcagcttatctcccttaataagaccggacaggtttacgccctttcccgtcagcagctggggcataaatgccagcaggccgctgtaatccgggtccagatactcgcctccgtgtttctccagatgaagcactgcctgctccatccgggagacagacattccggaggcaaaaagtcctgccacaattccccctgcgctggctcctgccactgcatccgggcgcagtcccgcctccataagggccttaagcacccccacatgggctgcccccctggttccgccgcctgccagtgccaatccatatcccataataaatccctccgccctatcctgtgtcaatgccgtaccggtaataggtacatatgcactggcacatccggatatgacagagggaagcaggtgaaatatagtttattcctaaaccctgaccttcactacaatcttacgcaccttgcagggagtacctgcaatacatctgggcttgtgggcgtcctcaggagccaccaccgcgcagtccccggcctttaaaagaacggcgccgccctgctccggttccttaaagaacacgatatcatccgcttcattataaggcgcttcctcttccagccctgcccgctttgtgtagccgaactgctcctggccctccaccacatactgtatatcaaaatacagatcgtgggattcatacctgcatgcatctgccggcatggtggtatactcctgcaccgaggcaaatacctcatccccgtcaatatcaacacggcccaggggcagcgcctttaaatccgtgtttcttaagaactcatagccttttttgaatttgtcctccaggtaatcgtatttctggattaaatcaatacttgtggtcagcatgtcaaccttcctttccttcgccgtttccggcaaacgccgcgatttcttcgtagagggccgtggccgcctctttgtcatagccgtacatcatcagcacatccaggacatatggggtgaaggtgattcctgtcaggcagcgggcaaactccatacccgcgatctctcccagacacagtatcctggaacggttagaaaacggtttcttccacagctccaccttttctgtctgggtaaatatggaatcctttttcctgtactccgtcacatggaacagttcatgggccagcagcacgtcctccactgccctgttgcccagaagcccctccagattttcttcccgaatcagcttctgcgcccgctctgctccgtccatgaaaatggtaatggaatccggttcctgatactgggcaaaaatcacatgcccgccgccccccggcacctggggcgttaaaaccttaagccccatgccggcagcaatatcccagacatctgtcttccccagaatcagctgcgcctcatttcgcccgcactctgccgcccgaaagccgtatgccagcttctgttccctggaaaacctgccttccagcgggtccctggaccaggcatagaggtaccaggctgtctcgtccagggacagcaggtgttccaccatggaatacagggacctctcccttgacggaaacgccatctgctccatcatggccctttgttcccctgccgtttccctgctgtttcccaaaaaagcccggaacagctttctgccgtcttctctcttcatggaaaaacctcctctgcgcctgtccccttctattctacaactgattctttgctccgacaatcacaatatcttccgacgggtccaccatctgcatttccacatccatgagcatgagaatctgctccagctcccctgtgccgttaaagtccatgactctggcgcccacacacagatagtagtcgggccgcaggatggcatctgccttgaaaatggccatttcttcccacattctggaaacaatgctccggtaggaggatgccttggcaagaaccacttccccgtctgtcctctgcaccttgataaatcccttcttatccaggatacgaagtggctttcggcccctgctttccatattatagacatagaagttaggcgtctggcccaccaggttcagctcttccggcccggaccttaaatcctccgccgccaggttccttgcctcctcctcgctgcactccttaagaaggtccgttgtcttgacctccgtggagcccagtgcaatggcagtgagcttggaggtctgcgggtcaatttcaatgtggacctccacggatccgggcgcagccccgctctccactgctttgtccactgcctcccgcttgatgcttctgatatcatccggcgtggggttgggtaccacccgctccacaacgtcgcggaccatggccagagccacgcctatggaggaaataacctctgcattttcaggcacactgtacttaatattcatcttattggcacagaacccaatcagggatgtggcgccgccgcccacgcccaccagggatatctggtcatgctccaggcggtacttgtcagccagctccatgataataggctcgatcttctcataggccctggtaagaatctgggaagccacatcctccaccgtggtgttcaggtaatcggcaatgggctgcatggctttcctggccgaatttacgctgccgtaggaaaagtccttgggcgtcaccagtcccagcacattggccgcgcagctgttggtgatggtgatgcgcttgccgctctttaagcggatagccacgtaatcctccggatctccctccttcggagaaaagaattccagccggggctccacgatttcttcctcatctgtaaatacggcgtaatccagtcccgcaatatgggcggaacgtgggcccacatcgtggacgccgctcttgttcacccgaatcatgcttccgcctgcaacgcccagcacccgcacatccagggagctgatataggtcctgtgtccgcctaccacagagtaatcaatggcagggcgtccgttcttgataacgccgatattggtggtggttccacccacctcaaaatacacgccgttggatgccctcaggtacataagggagcccataacactggcagccgggccggaaagcatggtcagcaccgggcgcttcttcatctcattgatttccatgacgccgccgtctccacgcataatcatgagaggcacctccacgccggcctttcgcacgctctcctccgtggaattggccgtgttcagcatcttgggcagaatgctggcgtttatggcagctgtcctggtccgtctggtcaggccgtagagcttggtaatgtccgaggcaacggttgtctccatgcccatctcgtcatgggcaatctcgaacacaaactgctccccggcaatgtcgtccaccccgtaagcgtctgacgccaccagcacctgggcgccctccgctttaagctcctcaaccgccttcctgaccgtattctcgtcctcttcactgtcgctcagataacggttctttatctttatgcttctgccggatcccaggtcgatatccttaaggcgggtctgatgctttgccagaaagccttccacgcctccgggccccatgcccagcacgcccacgcaggccacatcgccttcaatcagggcattggtggcctgggtggtgctgtgggccacgaaaataacatcctcaggggcaatatcattttcccttaagcagttctgaaatgccttcaccacgccggccgccaccccgtacctgtcatcatgagtggtcttgacagaagattttcctatgatttcatgtgtggcgttgtcaatcgctaccgcctttgtatgggttcctccaacgtcgattcccattctcaccagtctgtttcccatgtttcttctcctcccgttaaccaaacatgataaatgttataacctgcaggatgcagcagataatccagccgcacaccacgctcatctttaagaattccttggtagatacctttgcgtagctgattccccatacaatccatgactgggtgatgcagcaggacacgttcataaccgtggtggcggcaatcatcaggggagccaggaaggccacctcaaagcccacgccctttaaaatgcccagggtagccgcgccgcagccgtaaagggtaaagggtcctctgaacattccaaggggcgccagcacacagaaaataatggtgatgaataaggtgctgtgaggaatgatatttcccaatagcgcgttaaaatatggaatgcacagttcagccgccttgttgaacatgggaaccaccagcaggaagcctaccaggggagccgtatccaccacgccgtcaaagaagtccttgttaaaggttctgcaggcagcccggaagcttttcagctttccgcatacaaacagcgcatagaagccgccgatcagaaagcccatgataatgggcaccttgaacacaattaaaaggaatacagggataaagggcgtcagcagggacggtgtgggagcaaaatccagtttctggcgtaccggccttctggctgcccaggaatggaccgatttttttctcatgcagaacagaatcagtataatggtaaataccagctgtactgccagtgcaatgccgctgtagcttttcgcgaaaaacccaaaagcttttcgcataaattgcaaaaatcaactactttctgaaaattagcaaaaaataaaaggacatttgaaaggtattttatttcctatcaaacgcccttttacctcttcattatcatggctcatccggtatgtattccagtatatctgaaatatcacaattcaatgccttacaaattcggtcaagatgattcaggctgatgcgttcagcaaattcattgtatatgtcattgattgttgacgccctgattcctgtcactctcgctaattttgcctgactccagcgtttctctccaagaagccttgataaatgaattctgaccatccaatcaccccttacggatgattttaccgctttcgacaggtcttttttctgttttgttatattataacgaatatcgttatatttttcagaaattcgttatgattacttccttgtatctctcgcgattgcttgcatttccagccaatgtattgttacgcgtcacttctttacaaggatattgagaatacaattcatgtatccatgctacattattataggaaagaacaaactttcctttgatatgttttaagacatctgcaagacgctcatggtctttcatactaaaggcagcactataatatcgttctgtccctacataaggaggatccagataaaacagagcatccttccggtcatagacacttatcaaattctcaaaatccttgttctctatcaccacaccctgaagcctcttttggactttccccagataatccatcgcattctctatgcttttagatgaagttgcaaatgtgcggtaatcgcacccgaagcttatttttatcaaataaaaaaaacgggcagctttttgaatatctgtcaatcccctcatatccatctgcgctttataatcataaaattgttcgcgagaggataaaagccactgcaactcctcctgcagggcactgcaatgatatttaatgcagcgatacagattgactaaattcccatcccggtcattgtacacttccagctgacctgcttgcttctcttttgcaaagagcacccagccagctcctccaaatacctcgatgtaacgtccgatatcctccgggaaacgtcctagaatctccttgcgtaataacctctttccaccaatccatccaataaaactattcatccatcgtcctttctaaggggtaatcggacagatgtctaaatatctattatttcctaccaattaaacacataccgatggtggaccatgtcgtacttctccgcaatccggagcgcacctcttgcatctgtaatcatgcacttaccctcgttgctgcctttgacggggcagagtaaaaatgcctcgccggaggggtccgcctggtatccggtcagcatgtacccttcgctgtcaaacagataccatccccacgtcctgcgctccatttcctggagccagtaccagccattggccgcatagctgccgtctgcaaactggtaccaccagcgctgcccgtctgccgccggctggaagccttgggtgtatgtcaccgggaccggcgcataatcaatgtcacagagtttcagtaccttctgccagggcgtggcagataccctactcttttttgtgccataatcaatacccttggcttcgatgcaccagccatcaccaatgtacactccgatatgcccaggcttccaaagcgcccagccgaccatggtctcgtccaagtggtcaatgctcatccgctccgtggccgtgtcgtgatagttgtagctgccacggatgtgcccggtaaaccagctgatgaggccggagcagtccgtacagtgctggcctatgtatttgacggccttggccttataggtggatgtatatgtgcctggattctcccgggccaggcggtccaggatggtctgtgtcaggacctctcccttggctccgtagacgtaaggggtgcccaacttgtccttacaatgctggattaatcctgctactgttttactcatggtatttacctccaatctcaaagacctgggagtcatccaaggccttgctattatcttattcctcacagtcatccataccattttcttcacgatcactggggccacctatgccactgtcgtgtatctctggatgtggaacatttgaaggggcatcatacagataaggggtcggctgctttgcgcccaaatcaggccctgcatccacatatcctccattgccggggagttttgctgcatgcttgtttgttatttttgccataatttctttcctccttcatcttttataaatcattattctgttgttttgggtggttttgtccgtttccatatctctgtcactcgttcccatccgtctaatgccaccaatgctacgataaaggctgcaatcatacaagcaaatacggtataccagacaatagggtggtgaagccacgccatcagtgcgataaagacagctgggcaaagtatcaaagataacacaatgactaccgcctgtgtaggtagcttgtccagtcctggccaggatttaatgacctgtgtgatggctgacactaggaatgccattagcccaatggcaatcaatagatacgatacgtactgcattattgtacttacatccatactttttcctccttgatttgcatatttatctataataaaaggcccttgcgggcctgaatttttcgtaattaatgtgtataataccaagattacaaacaatggcattgttgattcctattctggagatgcagtcattaatttggactgggtaagggctgggactgtagtttataaagttcttaatggtacgtgttttgtcgattttgacattactgtaaaggcgattacagcagtaaatactctaatagtaagtggattgcctgcctcaacaatagtcaggcatggacgcattgcaggctgggaaaacggaaatatttctatgcccttttatttgaataatactgacatcattgctaatccttgcagtgcaggccggtatgcgggttgtttttctttttctataatataatcattttatagcaattataagctatgccaatccaaagcatagacagtgtttgtatcagacgcaacgaacttcaggcgaccgtctgtatccagatataacgctcctccgttggacccagaattgtggaatccataaccggcacgggtagcattattttcggaccatggggcctcggatacaaattgcatatttagataggccctatcacctataccggcgtaagtgataacatgctgcttacctctgtaagtgttatctccatacccggccttacttgataaattggtattgagcacagcagtataaaaattcaggcaaaactcatttttctgcatttttattactgtgttcaataccaagattacagattttgatagccgaatacatattgacgataccactaccattgcaaatcttagcgctcagataaagacaggattccagtgtgtctatctgaaaagcgctaatttaaagcccaactatgggcatggtgtgattttagagctaaataatgcatcgggactatatgcgataagaataatatcctgggatgatgatacacccaatataggaatgtattatggcattaaactgagtccctccacgttaatcaaggatgtaagttactttagcctacaagtcaatcgttagtttatccttggtatttggtcagatatgcaattttcccaactattgaaaccaaatgtttttccaaacaccaccacttttaattttgtaataaggtttttcggtactatctgacctataggcaacgattcgtatagtattgtcagatattttcagcacaaggccaatgtacacattaatcgttgggagataagggctagacggtcctgcagaaaaattatacattccatccataagagcatcgcaagtggctgttatatcttcctgctcaatgttgatattttttgctttattgaacagtacctcataattggtataatgccccgaaggccacaaaaacaggctgcataacaataccatgcaattgtaactgtgctcaacagctgcacaagggtacaataaataaacctccctgcaggcaggctttcaaaaattctattttgtattattttctatccagcagcatacatatcgtactcatatttcattttcgcaccgctgtttttggcataaatccgcgtagtttctacactagcgtgccccataaggtcgcaaagggttggaagtggcatccccttgtttagcgccctggttgcgaatgtatgcctcaatagatgtggaaacactcgctttcccaggcctgcgcgcgtggcaatcttacgaattatgttttccaatgcattctttttcagcccctgatgtggggcccgcctggaaagtatgacggctcccgtttttcggcctcccaaatactgctccagatattccagcgcacgctccgaaaaaaatacaatcctctctttctggccttttcccaggaccttgacgcaaccagccacaaggtcgatatcctcaacatgcatacccaccacctcgctgacgcggcatcctgtcgccaggaacagctctagcacagtattatcacggatatctgtcccacaggcaatgcgcattttctccatttcgcgggcgcttagggcctcccgaacctccgcaatatatttaataggatccacggttgccatcggattccttcggatatagcctctatcatgcaggaatgcaaagaaagagctggcaatgcggcgcttatggtccttggtgctcgcactaatttggcggacctgctcatagtaatttaggcattccacaatgtcagagtcctgtatctcctgcactggttttcccacataagccaataggtcggtcagaaatcgctggtactggttgaccgtactcgctgagtaattttcaaatcgcatctttcctataaaaatatccaattccggaaagctgattatattagtgcttaaccctgtttcccgtttagccacctcatagtttcggagcactgatgataatgctccatcaatcacctgcagcgcaggccggtcaagctcattggatagcctggccataagttcatcctttaatcttacttcatccatttaaataacccctttccttatgattttatggtactttaatcataaggcagggggagcatatcgaccagactgctttactgtgcgcaataccaagattattaaagcgccagactataaaaattataaatcagtatcactgccatttactgctcctaacgatggatacatatgtggtggcgtatatagtcttggaacaactgcttgctacatctatgttaatagtacccaggtgggctggaatcattcgggtggtggaagcaatactgcatcaccttttatgtatcctttatctaagggagatattgttaccgcgatcggatatgatcagttccgagcatattttatatatacaaaatagtcattttctatagctacaaaacttaatcatcggatatataaattaaaagaattagaccaatttctgttttccagccatgcattggactccagaaaacatattcggttagccgcttctacataaaggccaaatcctccgttaacaatgttgactttaaccaggtacataaaagccatagtccctgtaccagcttcgggagcaatgaaatgtagaacatcatcaactatcattattgaacctgattttctgtggccatttatgattatgcaggcttctctgtaatttcttatattaacgccaacagatgcggtattcttatttgacagggtagcagcatatatccattcacgattttgcttattattaaaattggtattgagcacattaagctgttcctttagcagctttcccatcggccccgatagcactgtttcctcatccgtagacaaaaaatcatttactatcttactcttaaggacatacgttcccagccgttccattaaaacggtgttcgttacaaactcggtcagcagcttatttgtaagggcgtctatcagaccctggccggtggtctctgcacccgcttctcctccaagtatcccatgagtatctatcgcttttagattagcagccgtaaaagtatccctggtgatgatacttcccggtgtcaccgccgctatcacattgctcacgctgccaaccagtacatacagagtgaactccgcgaacttcgaccggttcgtggacccattggcatagatataggttggatccgttgagatatccatgtacccgtacagtatctccccttcatccggatcctccgcaaatacccccacctctgtgaccagaaatccttccgttacgttgtcgctgctcacctgtactgtaatataggccatgtcatcctgtaccccgtaatccgctatctccgcatctattttataagcattcaggccaatcatggattccggcgaatatccctccggcggtttaccggtccctacggcagcccgtgtgaactgcagacttccctgggatgccgccagctttgttagcaacctaaatcccttactgacaacaaacgttcctgttgcctgaattgcatgttcatttgccatcttatcttccctccggatatacaatcatttttgtatgtatgtacacatttccctgtaccctgacatgggccttcccttcccggtgcccattcgtttcctgtggccgtcctatgtatcttacataggttcccagcgtggtgcccgcatacagctttcttttccctgcataacgctgcagatattcatgcaccgctttcagatgggctgggatatacttcatgatgcgctcctcctgttccaggactggctccctggcatcaaaatagtaacggatagtcagggtcagatgctccgcatcctccagtatctcgcagtcccatccggttatctgttttatcttggccttcaggtttgggatgttcatgacttcctcatttaacagtatcatcctctcccgcagccactccgccacttccaagatcacacccagatacgcctgctccgcctggagcaggtcctccatctgaggaatccgtatcttaattcccggaagcattttttcatccagaagcatttaatgtcagtcctttcaatgtgaaaaattggtcatagtccgctgtcatggactctcccccttcattcacggtatattccactatctccttcacgccaggcgtcccgcctatgagcatcccaatacgatagtaattcaataccgtttctttctttccctccagggcaacttccgccaggtaagattttacctccttgccggcctgggcgcggacactttccatatccgccccttcctgcagctcgatgatgccgttaatagtcacttccactgcctcagctgcacggatgaccggctgcgctcccaccggcctctgggtctcaatgtaggcccggaccagctccaccacatctggtgtaggtgctccggcctctggcgtgagcagggccacgtgtacaattccagacccatctctaactccatgaactcgcgcgctgccgataacccgtttcccttctgcgttttctacctgcctggcccagaacgcatagtgattttcatttccggatgtgatgacctcgtcaatccgcaggtcaatctcatcccacaggggtttaatcagcatgctgttgtaccgggccagctcctcagacacggcctgcatgttatccatggagaaactcccttcaatccgggtgtcctcatttttcagcccagccttcagcctggccaggatgtccgatgcgctccattccagctccattacctcaccgcctttatatcatgttgtatggtttcttcaccgtacacgcttctgcagcggaatgactccttgattccatccttttgcagcacgaaatcgaattccgatagctcctctatataagggttgcacatcagtgcttccgttgtgtaccgttccagctccatctgggtcacctcatcgttcatcggttggcctatcagctgctcctctatctcgctcccaaacgtagtatcataggccgtatatcggtacctggctgtttccaacgcaaaataaatccagatgcgcagggcctcattcccctggaccagataggtcctgccatcatcatccagtttcaggcagtgtttctcaaaatcatacgcatattcccggaacaagggaagtttcttggacgcggcttcctggactgtctcagtattaatgaatggaaatactcccatgtcacacctccctgcagataacataaaaggagcttcctatctgggccgccagcacggtatctccggccgttgcgtcacactgtgggtttccatgaacattatgtgagaacagttccccaccaatccggatggcagatggcgacacatattccgccaggatgaggggactgcttccgcctgccccttgctccttaatacgccttgccagctttgctgtatatcctcccatatcatcctcctcgcttctgtttcttgtcctcggatggcttatcaatctcaacctcatccatcaggttctggaatgcaagggtcaggctcatcgtagattccccattggaatatttgtggctgtcactctcaataaagaactggccaatcagcccggtttcttcctcctgtaccagcaatgcatatccggccatcgcccgtgtgtcatccgggatgcccgtgaccgtagcggatggatcacttccatgaagcagattcttagcttccgccgctgcgtcctttccctcttcctgttccaggactttctggatggttccataggccgcctggctttctgtatcctccacgatccccactacggtacccttttgattggtgattaaaaccttgttgacaaggttttgaagggtggtcttgtaagtagcatctgacaagttggaatctccggtcagtatcactccgctgtcctggcctttttcaatgacggatacccggttaacctccgtcatcatcagctgatatttcttaccattcttccgggcggctgccgtataggatgattgtatgacctgatatccggtcttttttacacatggattcgtgattgtaatacccgtggctgccatagttccggccgtgattccaagtgccccgcatacatcccttgcaatgtcctccggagccccgttataatccttcgtcaattcggatcctgttaaatagaatatcaggtcataagccagataccggaccaggttgcttcctgccatcttttcaatatcaaagataattccgccaaataagaaggttcccgtgtccgtctgaaggagtacctggtctccctcgttaatggtcacatttgggaagtttgggtcctgcgtgttcttggcaatggtaaattccagtttcctggctatctgtccactgtccccgctccaggttatggtttccaccaattcactcagatccttatcgcccaccaggatattcaactttcgttctcctttccgattacgggattgccaggaccgtccccggataaatccaccagccgttgttactgctgctttttccatgctgcttggcggctgcttcaatcacggcactgttggccgcatatatccgggagctttgggccccgttcccgtatgctttttttgcgatcccccaaagggtatccccgcttcccaccctatgggtcttagccgggactgcctcgtccgggcgttgtttcaagccgttgtcgcgcacctgcagcgggatggacacggtcggcacggtcaggttccgatactccgacagctccagcgtataatacatatccccgctgccttcctttaccttaaagctgcatttgtcaatcagcatagccaggttgactcccatgtccgtaatgatcaggcgctttgtttccttgttctctttccagttctcaatcttagccctgtatttcttagggggcatatcagcatagcggtaaaaaggggattcccggctagggaaaaaggaggagattgtcgctgtggcgacatcccggttcccctttaaattgaccgtccccatgttaaggagggtcagacgcttattaagctgcggcgtgatgacttccagctctaccgggttaaccggcaggacaatgtctcccagcttgattttcctcgtttttcccataagcctctcctttctgtttatgccgtattgtcaagttcttctatgattttctttgcagtgcgttcgctgatttcctcaatgtcatcctcactccttacatggacttcatccgctatcttttggatttggatcgtgatggtctttccaccagatggcgtcacatcccctccatcggctggttgtctggaaagttggattatattactgtctcccatagctgcccaggtaaagctttccttggaaggcagtatccgcgtccccttcggaaggtcaatcagctcagggcccttctcacccacccaggtgggaccgcctctccagttattgtctcctctggcattcttcccgggactgacgccgcttccggagcttccgcttccggtatctcctccgccggtcaccaaatccttaaccttggaccaggccccggccagtaagtccgcgccctttccaatggtgtcaaatatcggctcaagatgggaccacaccccgctgattgtatcctggatgccgggccataccttctggaccacgccaaataccagctcaaaggtggtaatcaggatgtccataaccgggctgatgatgccccaggcagtttccagtaccttagcaatggctgggcctgccgtttctataacggactggatgaaatctgaccgttccgctaaaaattccaccacgccgcctatcttgtccccgatttccgacatgatggtcgtgacaaccggagctactacggagatggctgaaccaatcccgcccgccacagcccctatgatagaggccgcctgttggataaccggcaccaggctcatgaccacggggccgatacccgtcatggccgtggtaacaaccggggctatctgtccaaataccgtggacatactccccaagaagctggatgcgatgggcagagccgtggataccacgctgctgatgataggagctatctgagtgaaggcggtcttagccagaccgattcccttcccaagtccctgtccgaatccggagctaagtttctttaagacgggctgtgcctcgtccattagcccaatcacctcggacaggaccggctttaactgctccaccacaccaaggccgaagtccgccgcgttgctcttcattttgccggtgatcgtggacataagccccgctccggaaccggccagctttccggctgctcctccaaaaaagtcctgaagttcaccggatacgccggaaaatcccttctttttgaactcctccgctgaaaccttgaagccgaaggatttaagccgctccgtctccccgacctttaagtctcccagggcctcgatggcatccatgatggaggcagtccctccactggctgctgccatatcctccgccagcgttaccaggttcatggcgtccgtggtgcttccaccggcaagtgaaatggcccttgaaccagcctggatgacttccccggtttcaaagggagtcgcattggcattctccctcagctgctgaatgtaggactgagactgcgcctttacatccgcttgggaaagctctttattcgtggccccaacgaaatgttcaatggaaatctgctgctgttccagctgcatccccgcactgacggatgcgccaagggccgctgtcccggctgccgcagcaatccccaccggtatcgccacagccttggctgccttgccaatccttcccacgattcccttgatggccccgctggccttgtccaccaccttaatgacgggggacgccaccttccttcccagacggtccaatgcaccggctgtcttttttaccaccttgaaagccgtatccttcgccttcagcacggccgttacaggcctccccacagccttcaggacagttccagcgcccttaatcacctttgtggctgtatcctttgccttgactgccaccgtgaccggtttggttttcttcgctgcatccgtgacacgttttaacgctttggtcgcatcgcttacatcggcctttagttttctgggtgttccccatacgcttttcagggcgctggatgtcttttttgtatcctcacggagttttgactgctcgctccgtaggttcctcaaggtggcgctggcgttatccttgaggctgatgcttcctgttacgcctcccatcgcctacctccttctggacagtaccctgcatagtgccttaaaatattcctcctcccgcttctgttccagccgcatggatgcgacaaagaaaagtttctgggacagtcccatggacaggagatattccggggtgaatcccttctggatgtaatggcttaaaaattccgcctctccatccagtcggattagttttttaggctttcctctatgacctcaatcttgttctttccacttacaccggacagctccatgatcttttccgccatctgcctaatctcgtaaatctcaaaaatgtcaaccacatccgtgtattcctggatgttcccgtcctccttcatctgcttggcaaccgcttttaaatccggctccacggtggctatgtagacggaatatttatcacctgcgtaagggtcatccgtattatcaatctccgacacctccgcaatctcctgttttgaaaggccgcggatccggatccgttcatctatacttggcacccggacaaggcaggtgcggtgtatcttcttttcctccgcccgtttttctgcctttgctaaaaaacgtttaaaaatatcttctttattctgttccatcttccgattcctccgtcctatttgatttcgtctaaattcttcatgtcacttggagtaaagccgaactcccactcctcctgtacctgtccccctgtctcccagctgatgaccgggatggtgttccaccagacattatccgtgctccagcgttctatctggccgtccacggcatccgggtccttcagctttgcaatgatctggcagcggacatcctggcctgcacttagcttttccaagacagcctttgccctggaataaaccttcttgatggacagggtaccagaccccttaagcccggtcatcttactgtccacgttcatccccatctgcacatcctcgcggttgacctccaccttctgttcaatcttctgaagaacgaagattttttcaccgtccacccagacctctccccagcttccggtcagggtccggttccctctcacgtttcctgccattgtctcctccttacatgttcacggtcatctgcaggtcctccattgcgtccacgaactttacatggctggcaataaacaccttggccccagtgttggccgtcagaatttctgtctctgtcatctgggatacatcctgcccccgttcctgcaggtactgcttctgggcctgcgcgtccaccgatgccgtattgtcatagctggcatccagcacctcccctgcgagtcctgcctggtacgcccgcacagctgccacgaatagctgcttgttgtcatagtcattcacatactttcctacatagctgtctgtgaaggtgttgcggatgtcgtcctgatatagatccatcccctccacgatcttaatcttgcgcacatcctccgtcttttccttcgtaaaggtggtcaggctattaacaccacggcccaccttgtacttttcgccgtcaaacaccagaataaactctcccttattaatgcgttcatccgggtccgatggacactctgcctttaatacgtctcccagcacgtagtaagtgctggagcgtgacagggaaagcccggctaagacccccgcaatccgtgcacagtattcctttgccgtgtgggtctttccagtaatggaggactctatcccatccgtggtcagattgataatcccttcatgatcgctggcacttgctgccagcactgctttaaatgtcttatggttcttatctcgcatctccttgatccaggccgccagcgtggtcttgtcctcgtctgaaatatccggatagcacaggtaattccagcgcaggtacatcagctccttcaaggccgcagccaggttgggggactcggcggactccctcagtacaatcacccgcacgggtcctccttcgaatagcagctttaaatatccgtagttggcttccgtcatgtgctcaaagtcaatgtccaggatgctctcatagaccgacagcctctggccgccctccgtgtcatcctttataatacaggccacaatccccctctcgctccgttcgatggcggaggcggcaaggcccttaaatataattgtgatgttcggtaatcctaatgccatgttctcatcctctctcggttctcatttccagtgtcccaatctccgttccttcctccggcctgtccgatacgatgaaggtaagagggaaggtcaggtgaagcatgccgccgctgatattggtggtaacacgggctaccgtggctgcccgcctctctcctccgtaagcaaatggaaagaccggccggaatacgcggtccagttccatggccttttcgccatatctgcggattgactcctctggctcatggtaatctatggataccatcagggccgcttctgtctggtccgggctgatggtcgtgaatgaggcgggaatcacctccacaaaataccatttactgctatcctcatcctccggctccagcgtcctgtccgtccgcataatttcctcggcatacacatccacatccggttcatggtcgcgcagcataccgatggccgcgtcctttactgcctgtaagatgttctcatccatacagttagttcctcctgtcttatacaatgtcatgggtgttcaggaaatcgttcatccactcctgcaggtatccgggaagtacggcctgaagctccgcaagggacagctccatcatgtgggcccccttaaccgtctttgccttcaggcgcttccccagggccggaacatactgccctaccttctgccgatgcccccattccaccgcttcggcgtactctacgttgttgtacacctcaatcacatattcatccccgcgtttccggacttcccccaccttccagttgttctgcagccagctggtctttttaggagttttctccttgaccttgccctgcagctccatggccacctggatgaccatggccttaaactcttccggatactgctcctcaatggccctggccagttcctgttcccattcgtccagtccatccatgcggtattccgtcccggccatcagacacgctcctgttccaggacaagcgggacctggttgtgagagggctgacgctcggccagtccggccatggctttggtgagccgtcccctctgtttaatttccagatagtcattaggctctatctctatctccggacgcacaaatagactatactgggtggggacacttcctgcgggcagttcccggttcagagttcctcccgtatgggtggataaagcgcaggagatagattcataaaccttccttccctccgctttcctgtgaaagaccgtctctccgtttggcagacggtctttgaaaggtcggtaaacagtcacggtatcttcataggtcaaagccaggatatctgcttccgtcatgtgttcctcctttattttggcaggttcatctttttatagcggcgcagctggggctcatagtctttcaaaagccgggagcatgcctgggtaagggccgtgtcgtcccgataggtgatggaggtatctcccctggtcacggaggtgacggcccctgcaccggacaggttcatctcctcctttaaggtgtcctccgccatctgtgcaatcaccggctccagcatttttggaatatcctcccgattgcagcggatgaggaccatggttccaatccgccgaatacaccgctccacatctgatttcttgtcatccgatagctttagggaggccatcacctccccggttatccaagtaagctgctcactggtcatatgcgtctcccctccattacgccgtttcttccggttccacagaggccggttttgcctgtttgaaattcgcacgacaggtcttgagcttttccttcgtgatccacagatcatggtatctccggtaatcccatccccatgcccgtgccttctggttggtttccgggtcaaagatacgcattttgtccgttttagagaccgcgatgggggcgttctgcggcgtgatgagccagttgatgtcaatggcgtcctccgccgccttaaatccgcctttttcctgtccggctgtctttccgtcctggaatacatacttggacttcatgcggctagaaggcacggaccgtaagggaatcccattcaaggatttgaccttgaccgtcacatctccctgggaaaaatccgtcacatccagccgcctggacagcttgtccgaattattcaagaggtttaaaaccagggtggagatggaaacgatgagtgggatgctctcccctaccacgtcctgcacagccgctatatcatctaagagcgctttcaggatgcttgattccgcaggcgtatagctgtattctgccaagtcagatcccatacatttttgcgcaatggtgctgtaacggtaagcatcaatctccgggaccacatggacccgctggaattctcccatcaggctggcggctgccagcacaaagccggactcatccacatcgttttcatcaatctggaaggagcggcccctgtccttggtcatcttcatggtctgccaggacaggtccacgctgcccgcgacaaacccgttcctccggtcatagtccgccagcccgtccatgacgacatcggggattttcacctcatcgcccccgctgtagcgcaccaggtcacggttcacctccatccagccggatgtagcctgctccacagccgccgcgtcaagagccggctgaaatatctttgcatactcaattgtgtttgccatcttataatcctcctctgattcgtttctgaatttccgcgctgatcatgccgtctgtcaggctggctgctcctcccagtcccttgggagtggtgcccttaagccgctccttgatgcctgtctccaactgctcctggtacatggctccaatcttctccaggctggccgccatcctggcttcatctgtataatccaggaattccgacagtccgaccggaagctttttctccgccagcttagcggccgctttctgttccagctccatccgcttcagtttcccggtcagctctgcgttctcctttttcatagcctcgcgctcctcggcctcccgttcctgcggcgaaagcttctccaggcgcttttcctccgcccgccgggcctcttctgcctcctttgcttcctttacggctttttcaatttcagcggccagctctgcctgggtataggttttttctgccttcttttcacgggaagcctccttcccgtctgtcccttcctcctttgtttcccctgctgttttcccatcctttgcgggcgtctgtactcccgggccctcctctttcttctggcttcctcccaggaggctgcgtatcttatcaagcagtcccccctcctcctgtctctctccctgctgctccaataccgtttctgacacagctgcctttgttccttcttccatccgatgttcctcctatccattcacttccgccatgatttgggctttctcttcctctgtgatccacttctttttgaccgcattggtcagatattgctcgttgcctgtttctcgatagatacgggtcaatgtctgtatcatgctccctcacctcctgtcagtgcatccatagcaagcacatccgtggtttcctccactgcccctactcggtccgccagcttttcaagctccgtccgttcccggatcccccaggaagcaaggagggtgccgtcctcctttccccggactaccagcaccggatctccaaatattaggtgctcgtaggtcccggtcaccgtatcaccgttctttatctgtacccgggataagttctcttttgtcatcttctcccaatccgccattaaggcttcccgcccctcataggcggcctccatctgccccaggcaggatccggcttccaagatgatggctgttccgtcctttaacagtaatttacgtttttccatgttattctccttccattgctcctatttttgcgtaataaaataagccccatagatgggactcattctcatttcgttactgtatcgttccctccagatgattctggctcaatccgatacgggcaggcgttcttcccggaccatatctcttttgggattcctttttcatatgacagacagtagtggagcttccatgcctcctcctcatcacagggagccaggattccctccatcagttcatcgtataccaggcagttttcacagttctcatgcttcatgcgatttacactccttcaccaggcgttttatgtattccggcatcggctccccgttttcgtacataaccgctgcctcacaaataaactcccgttcattttccgaagcgcggtaggaaataccataaacatcgccgcttttcatagccctattataacattcctttaatttcctgtcatcccgcatccctgtttcgtttacaatcatatgcatcatttcatgctggatgacgcatgctatctcacggcctttatataagacatttccccggctgtagcgttttaattccatctgcctgccatatgcctccctgactgcttccgatgccccttcattcagtctcgcccgcagctttcccatggaagtttcaatccgttttgtccaattcagtacacttccttcataatactgctccggcgcattcatgagcgccgtacccatccgcaatcgttttcctacggctgatcccatttttccaggcgcatcccgggaattaaatattgtgatttcatccagtttctgaaacggggcctttgcaagctgccgttccagctctgcagctgctttcttgtaatttgcttgattcacctccccggtcacctttaccttggatgcgtagggctgcagcaggccggtcgcctcccgccgatcctttagattcgcaaagatgcctttcttcgcattttcctgtcctggttctgattctgctttatccgcttcctccatatgttttttcttccattcttcaaacttcggattacttttcagcggatttccctggcgttgtttaaatacgggtatatcataggctgccaccgtggtgcatttgcagttcggatggatgggcggcaggttctccccggcccgcgcgtctgatagttcaaacacctgaccattcaggcgctggcaaatttcacagcctccgcccagaaaacggtactttgtcaccccggcatcctgatacgcaagcagctggccctgattggcaaagtagctggcctctgtccgtaccagacgctgggccgcataccttcccttccccatcacatcgtcaatctcctttgcaatcttatccacactggccccgctcatgaatcccagagtcagctcacggcgggtcagcgctgccagctggtccgtgttgtcccaaagcgcttttgaatactgctttccgctccatggataagataatatctgctttaacagccgttcatccaccttcgacacatcccaggccactcccccgatactctggatatcgaacattttacgttcatagttggtctgcaccaggccttccagcagtccggtcagctctgtttctgaccggccggccaggcgggccatgttgtggtagatatttgccagcagctgctccttccggctgacctggctcttggccgacagggtgttcagttccaaggccagccgcgaatccttcccctggccttccagttcctcaaggtacccttccagcgagtttttccatgtactgtattcctttcccgtcagcagctttgaggcctgggcctctgtcagctgattgtcccttgcatgccggctgtaaaaggcccggatttcattttcaaggccattcacacattcgtcatacagctccatcaagtctgcctcgcatccatcggacgcttctgcgtttcttaagacctgttcttttgctgcttcaatccatgcattgcgctgccgctggttcatcctttctcagcctcctcttccggctcagccgttccctccagtctggtttcacgggtctggaaagcccgggccaggttctggtacatcccaaaggattccaccccttcctgtttctcctcctccagcttttccagttcctccttcggattgtccacaaagggcaggagttgcaatagcgtctccttgggcagcatgctggacaggtttccgatgatttgtgactgctccagaatgttctgcggcttattacgccggaactgcatatcaaggtcccggtaatcatagttatgtcccagcaggttcaggacgtgggtgatcagttcaatcctccgctgcagggcccgcttgaacttccgttccttgatggcgcatatctgctccaggccccacaacttataggataccgccaccccggacaggttacctccaaacgcttcatccgtcatgttggggacattggctcccaggtggatatcctcacgcagccggttcttatagttctccagcgccgtgtcatccactgtctttaaaatccagcccacatcccctccatcctccagaataacggcacgttcccgcttcatctgcgctatgtccttggaatccacatcccccagccgcgtcaccttcaggatggcatcgtcattgtactggaaatagttggccgtattggattgcacccggttataagcgtcaatctcggaaaggaccccttcaaaatccccaatccgctcccggttgttgacgtactcgcaaaatggcacgtcattccaataatgctccttccacccggtcacttctaacactcctccgttaaaagattgtaggtagataacccgtgtccacgtccaaaactccacacgcaggagaatgttcccattcttatccatgccccgcaccatgcggatagccgcaagcggggaggtgaactcgctttccgtctcataaaacaggatgaggttttctggaaaaaccaggcccagccgaatcctcccgtcctcatccagataaaccatctcaaagcagtcccccttgatgctgcactgtttccccagctccgtgttgtgatcctgctcatcgttatagtcgaagatatcctgaatggtctgcagatattcctcgttctcggagctgtacaccaccggctgtcccaggaaatagcccgtggccgtgtcggtgatgtagcgggccatgttattgacaatccggttgtcacctccggtcttatccgttctctctgaatgcaggatgtcatgatcccccacatagtagcgttccagtttctgatatttcatctggtaactctgcttcaccacgatttcccggatatccttcaccgtcagggactcgatggaggcccggtccatatatacaatcattggattccttctttcctctttcttatcagatcaagctttcccttgggatgaccttaaactttctgactttcttggccagggtccggcacccctccagggcgtctgggccgtcatcatgggctcccattgggaactgtaccagctgctccagcaggcgcttatggcggcggttaaacttaatgtatttgttcttgatatccggctgcatggtctggatgcgcagcgttttgtccgccgtctgtgggacttcctccacaggcaggtacagccccgctctggcgctggcttttaccagctcctcctttaagaaccattggaactgcaccgtctcacaaccgaatttcttatatcccctgccataatctcgtctaagccgccgctccttttccaagatatctgaaatgatgcggtccggatggcggcgctcaatatcggcatcaaacacatacatatatcccgttcccttatgcttagccagggtaatgatagccgaaaagtcgctgtgcttagtctttccaagggatgggtccacaaagccgtaaaacacaaagctgcggtctttaaagtccgcctcggcttcgttgtagtaatccagccattcctcctggaacaggcagtcatccggattgatgggctcgttctgttcctcactattaaaggatgcctcaccctcatcaatccgcatcttcatcaggtcataataggacagcttctcctcccacaggacctccgtccctttgagcatctctgccttatgggcttcaaagaatgcctttgcgtcctcctcatgggaatcattggaaaggtccgtgtagatgtcctcccattccttccagaggtcatctgcctgggagaaagagagcactgccttgtatttgatggatttataccccgtattggtcagggtatgggccagcaggctgtcatagtgcagcagggtcccgatatacacgatatccgtataactgtcgcctgccttggaaacggccttgttaaaccagtttgacagcttggaacgctgctccgcggtccggacgttctcatcattctcgatatcatccaacaccagcaggtccggcctccagtttcgatgcttcctgcctcgtatcttcttgcctgacccgatggcctccaccttgatgttggtggtagtcaatattacattgttacgccatacctttccctgcagattcccgaagtcctcccgtatcaggccgttttcctcaaactccacacggatgttctccaggaatccttcggcctggtccgaactgtcagagaggatgatgggataatgcttgtactgatacaggatggcgtgcatgctgcccttgaaggtcagcgtggtgctcttcgcatggcctcggggggctgccacggcccggcggcatccgggcaggcggtcaatctccctggctaccttcggtgtgatggggaagcggccctttaacacaccatcctgccagatggcgtccaggtcccggtggaagccaggggagggcttggaaaagtagtgggggaagtaagcgcggccaaaaaactccatgtcaatggctcccagcttcctgcgaatcccctcaggtccggtaagtggcaggccggaatcatactcctttaaaagctgcctgcgttccggctcctcacccttccttaaaaaaacgttcaaaagttcatccaggtcgtttaaaacgttgtcctcttcctcataaaaagcccggctttccgcctccgccagtgcccccatcaaggtgtcaatgcttttctgctttcctttcctcatggcttccacctcctccctgccgttcccggcttcatatacggcccgtatttggaatttcccgtctattggggcgtttccccgctgggaatcttttgaacgcttttaaacgggtcctgatacgatttaaacggggtcttgtcccaatcaaaaacggaaccccgcctggagttcccggaaggactggcttcgccatcccgaccgggcttttcccgcttggttccgtttccttatgtccgcgcgcttcctgcaccgggacgaatcaaccgtctgcattcttcgcgtttcctgtctgtcctatacttcctctggcagccggatgcccagctgcacctctttcttctcaccacagatagatagctcaatggtagccctgaggctccgcttatccatccgtatgatacggctcttaaagttctgcaggatgcctgtttcaatctccaggcccccctctgtctcccgcaccagtgtgggctccagaggtattcctccctgtccggccaacagccggatccattctgcttccaggtaggtcagggtaccggacagcagctttacgattcctgggacagccttcagccggtaataatttccggcattgtaatccatctggaggaacacataaccggggaacagtacatactcctttgttccccaggctcctccgcttcggaccggacggttctccaccggtgccagcgtctggaaccccatgtccgtcagtttcgcggcaatgtctctttcttcaccggttctcacctggaccacataccacagcatggctatccctccatcccttcctgcttctttttgttcagataggcgctgacttgccggtacagctccggctgttccttggccatggcctcgaataccagtcccttaaccgcttccagtccggcctcataattctcccgtgtctggacttcaatacgcttcttgtaggccgctgcgcggataaggccgttagtctccttaatcagcttatccaccggcacttccttcatctgctcctcgtccacgttcgtcagggcattcatcacatgatggctggccagacggataagcgcctccgatgtgtccagatccgggtagcgattcatttcatccatcagcattgaaaagttactctgagccacgttaatcatttccaccgtggccaggtacttcttggcataggtgcaaatggccatttggctcatttcctcaccgttttccttcaggtatgccacaatctccttgtaagtgcttccggtcagcagcatctgctccactgtatcctttagctccggaggaagccggtctacctttccaatgctgcgacgccggttctcgccgctcataccttcacacattcgtcagtcagacttccctgcatcagccggatgcccttttccgacgcccttgcttccaattcgtcataattgtagtcggccagatccgcgccagaaatgcggccttcaatggtacgcgtttcgatgtatccggccaacttcaggaaatggatgctgtccagaaattccggcttttccacgccccagtttttcactccgacccggacctgctccaatgggctgaagccgctccggttcagcaggttgatacaggtaaggaccgatccgttatttgccgggaacgcatccgctctgatccgtttcatcatttcgtctctgttcatatcactcaccctttctttgctgcttctatcatcatttccatcatccggtccagtttccggtccatcttgctgatttcacggataaagtcatctttggtcaggtagttctcacgaatttctttaatgtccttccggcattcatcaaagtccttctggtgggtatccctgggtgtataatcctcacggattttccggatatcgtccttaagttctttcgtctgctccttcaaatcctctttactggcagattgttcgcggccctcccgaatctccgtgtcgtgccgatctacctgggacatggtccgtttcaaaaaatatgagacaaccccgattcccagggtgattactgtcgttatgacccattctttcatcgctaacctcataattcaaaaaaatacacctgcaaactagtgcaagtgtatctcatcatgaggcaatattcaaaaaaagtacttaaaaaatttagtacaaaattccttttaaggatatctggccatccatcggctttgcccgtatctcgcgggctttctctatgactatattccgaatccaggtttctgtcaatccatatttcaaggcaagctcacggtagttctttccgtcaaactcctcccgtataagttcgtccctcaccggtttctccaggctctctatcttggggatataaatgggggtaccgttatagttcctcaccagggcccggaaagcctctataccgatgagtccggcaagggtacgctgctcctcatccaggtcctccatctgtaccctatccaacaggtccatccttacacccccttccggcgctctttacatacccctttaatacttcaatcagcttgtttcctgagtcaaagtcaatccaggcaaagggtgtcctggcaattgcgtccgtccccagttcctttttgatgatggcgcacagacgatctcccagtgatacactcccaggctttttatcgtacttggccagctcatacatcaaggcccatatcttcttctgctggccgcttgttaccccgccaggcctcgatggatgctcccgttctcgccggggccttggaggggcctgcccgccctgcagctgcgtaagcctggcaattacagattccgcttcccgatagctcagggccttcacggactctttcccggttatggtggccaccagcgcatgcagctcgtcctcatggtcatggcccacaaggcttaattgatgtccaatagcataaatccgcttcatctggtatgggtcaatgcttctcatggctttatctctcccctcctctatggcctcctggcctgctgacatttcctaacttttttcttccgctcctaccgtcaccttgaggctctcatccacaatcacggccgcgttgatgatatcaaccgcttcctggggtgtcccgctccattcggctgccttcagcacctggagcatccactcccagttgaccacctctgacaccagataggcccagtcgctggcttcctttgcgtccatcccggctgacttcatcaggctttccgtgtccttctcatactttcctttcagcttcttacgcagcgtccgctgcagcttctcatccttcgtgatggcctggatggtatcatccagtgtcccttccgtataggcgccaagataggcgatggtgaacaggcgcttggccggagctgcaagggaatagctggtcttttccgttacaaagtccgggtaaacggtatttaaaagccgtttgaccatcgccatggaaactggcttgaccgtttcactgtttcccaccaccacccgggcattactgctgccccagtattccacggtctttttcttggtgtcctttaagtcattgacagccaggttctcaaaccacgccttgatttcctccatctccgcctggacccgttccttctgggccgtcagctccaccagacggtccgccttggctttgatttccattgttttctccgtcactggaacacctccgcaatctttccggcacaggtccggcagacttccatcccgcatacggcagccacatcctccactgtcccgcagaaccggcaggctgggacatgcttcacgatatggattccggcagcatcggctgtcacatccactgggacccccggaaggattcctgtttcctggcggagtatacgtggaatagtgataccgccgcctttggtaacttttttactcatctgcatggaatttctcctttcccactctgcattgatcagggcttgtgacctgcaccggctataggccggtggctgcattaggaaggggcggatgccccttagcggttcctttttccataccgccacttattactgtatttctgtacctgacagaccagggtgaataccgcttcaatccgctgttcctgcttcatctggtcactgtccagcgtatagataaaaagtttactgccattatcccttatgtatacggtctcctccgtgtgcaggagcagcatgttgccggtgtatacttccccataccagcgcagcttcccgctgctgtcaatcacacggggttcaaagtaaaactcatcccttagtgccttcatcctttctcacccccatccaggccgtctggagcaggaaaccaagcaggttccatatccggtcccggatcttctccatgcaggcctcctggccaatctcctccgaatagtttcttgggtccacgcaggcactggattccaccagctcaaacccatttttcaagatgcaccggaccacggccgtgcgctcccccagcttcatgacctctacctggtcaatgaacgcctccaccattccgggtccgatgctcacgccggatgggagctgcgggttatcatccacttccagataggagtggtcaaacatccccttggggctccagctgacatatccatccgggtactgtatcaggtatccttcatcttccgggttttcatccgccgggatttcccacccacggtatctgttatacgcgcctcttgtcattggacgcgcctggaccagcttggttcctatgtatttcttcatatgtttttcctccaatttcagactatttttaagaaatatgcaactatattcaacctcagatatatcacggccgcgaaaatgatcatggcaagtaagcaggaaataacttttaacttcataaacggcctcccttccttcgcagtatatcagtttagcggaataactgggcaacagcttctcgccccgatatacgctttcctaccacagtaagtccatccacagcatacccgccactgtatccttccagcatgacgcactctgtcccgcaaatatcaaaatgctggcttctgactgtaaaaaccttcccctggttcttttctgctacaacatatttttcattcataattacagaatcacctatattcatatagctctcactttcctccggctctaccggaaattctaatatcccagataccggccgcatgtcccaagggggcataccggattcaggtatttccttcccactgcgcatacacacaagctgatgctctcacccctgctgtcttctattactcgcctgtggcgacaggacaggcatcgttttcccatttctgtggcctatgctccttttccattcccgcctccttctactctcggcttgtatgtccgcttcccgtccaggtactgttcctccgttttctgacggcccaccagttgattcatccgtttaaggattgctctcgctggctgttcccggaagaattccactacctgctcattccgtttcatgatgtccttctgttccctgcgaagcttccggctcctggagagcttcgttgccacacggctccgttccttgctggtggccgcaaactccatctcatgcagcaggtcctgcagacgccggtcctcaagggctaccgcttcactggctgtccggtactgctcctcacattccttcacccaggccaggaactcctccagccttacggaatggttctcctgactcttcaacttaacctccctccttttatactttcttcttccttttgtttcctcactctgcatttgtcagggcttgtgacctacaccatcaggtggctgcattaaggaggggcctagacccctttttactaatgagttattcccggtgtgaaggtatcaggcatccgtcctggcggccttctttatatcccttcagccacacctgatccgcatccagacgcgttctggtctgaaatccaatcatccagccgctcagacccgccagaacgatcaaacccagaacgctaatgaatccccatattccaagcttgcccctcatcactaaaactgttagtactgccgccatgctgctcccgatcataagtcctcttaccatcattatcactttttcattcaaacgcttcatgcctgttcccctcctatataaacctgattcccatggtaccggccacccgctcaagtccagccattgatacatcctcatcatttaccgcgttacggaacacattgaccattccacggattccccacttgcttcggctgatgctgtgcaggtagtcaatctctttcgtcatcctacgttcttccaatgcgggaagcagtttgaccacatcttcccttttgatgtctgtagtccggtaccggccatggagccgggtccggttaaactgctgggaaaagatggcttcctgtctgcccagcatcttattgtatacttctacgttaccaatcaggacgatgccgatccccggcttccccgtaaggggatcttcatccacccagccccttatctcttccagggccatgaatttcaggttctgggcctcatcaatgatgatgatcttatccgtctccttcagcttgtcctggattgcaaaggacaaatcttccgtccgctggttctccggcagtttcaacgccctcccgatcatcttcaacaggcttcttaacgtcccagtgctgggggccgccttcaggtataccgtggtggatgggttgtcctgaaggaacttggcagctgccttggttttcccgattccggcgtctccgtcaataaccacaatccccttctcaagctgacagtagcggatcaacttgtaggccgcttccgatatggatgtagggatgtatccctgcaggttggctcggaagggctccgccttccggctgttctggccctgttcttccttgatccggaagaattcttccagctttttctcgacctccccaatatcgcccttgtcatagacgcttcggcggtactggctgagtactgccgcgctaatccccaggatcggtgctgcttttgcctggcttaggccctcggcctccaggtaatcttccagcttcttctgtaattttacgttatactctttactcattgcatttacctccctgtctgtcccttatctctgtttttcctgttcatgtctgatttccgcattccggatcattcgatccagatcgatacctccaaccaccttcttaaatgctggttcctcgtctgccctctgaacctctagcaccttggggttggccttgccctggtaattctctttattgtattgtgcttccttcagcaccagttccatggctgttaccttgtcacagtctgccaggacagcatgttcaatatattccttagcaaccttttccagcctacgggtttttgccatagctgctttgacatcttctctgctagcattataggaaagaactgcttcattatccgctggtaccgtcataatgtaacggtcctccaggtcataaatccgtacttcgcttaaattatccgggtcatatctgaaatacaccttcttgccaagcattagatgaacaaaatcatcgttccagtaatcaattcgccctcctgcaatatccaggtgcacccctcgcctgcctacggtctgtgcacggctgctgcgcataagcatgagattcagggcttctgccgtggctgtgcgttttttaatcagatgttcgttaaatacatccattttgagttttccatggtctgccgggaccgccccatgatagggctgaaggttgaaataatagtcaatcactgcctcgacatattcctgaaactcatcatctgaatagatttcatccttctttaaaacgccttttaaacgttctggcttttcaaccacactgcctcctgtataagtatcaaacagccttgacagggaatccttgacatcgcgaaaccggcgctcaataatcttggcctttgcgttccggacaatggcattcgtcatgttgattccaagccgcttgaacacaccaggtggttcaaaccgctcctcgccattctttggcttctttctgcggtgccccaaccctccaatatcgaaggtcaggaactcccgtccattatccacataaatgttatccgggatgccgtattccagaatccctttccggagtgcaattagtgtggcctctgaactggggttgtatgtaatatagtagccggtcaggatgccgctgcgggcatccatgaaagcggtcagatatggcctgtgctgcttaccattcttgtccaccacgatcacgtcaaatgtatgattatccgcaatccaccactcattactagcaatatcctcataaattctgcggatatagggagcacagcgatcattgtatgccttatggccttcacgccccagcaccttcacgccttccggtatatcccggttaagcctccggtaaaaggaggaatagctggggatatccgtatacagttctggctgcttttcccttatccacatcttggtatactccaggcacttctggatggtatgctgaccctcatccaggtagtaataaaggaatgcctgccagacagtctcatggatgtcacttgtgccttttctccattttccacgcttatctgtgagaccggccatattattctcccgaactgctttccattttcgatataagatatccatggaaatggtccggtctggatattccaggctgcaccagataagaaacttctggtcggtttcccccttgctcctcttgggggccaggttacggtattcctgccattttctcaccaactctagccagaagtctatctccagccgttcttctgcggaaaactgatctgtccctccccgattctcctcttctataccgttttcctcgcgcatctgttctacctgcatctgataccagcgctgttggagttcatccgggagactttccaggggaatctggtacactttttggttcctattattgactgttttcactgacggaagttttccttctttagccatcctttgaatatactgaactctacatcccttaacttctgccacctgctttacagtgagcatctgtcccatatcctaatcaccaccttatagtctctcatcttcagattcggggaactgcctctacattacggaacatatgccccgcttcaacatttatttttcatgaaactgttcttcatttacagaaaaggtaagacaaaataatttgatgaacataggtgtaggtactgtttttccattttcaacttgacttatatatgactgttcaacagtcattgcatgtgcaatgtctttttgcctaagtcctttttctttgcgtatatttttgataattttaccagcatccaaatcattcaccgccttaattgatttttttatctctctaatatataattatcagtgtattaatattttatatctgcttactgatatttgtcaagttattttggaggtttttatcagtatactgatattcattggagggaaaatgaataatattagtgatagaatacgagtgcttagaaaatccgaacatttaactcaaaaagaatttgcaaaaagacttttgatatcccaatcttatttaagtggattggaaaacggtaacgaaattcctactaataaattactaaagcttatttgcttagaattcggagtaagtgagtcatggcttttaaatgataatggagaaatgtatacggaagtatatgaaaatgataaagcgtccttgacagaagtgtcaaatggtgctttactcaaaataatgactctcctttcaacaaaatctaatgttgaatatggtttttatgctaattctcttagtttattttctaatatgttagattgttctcattcccttggggaagatagaaaattaatttatcttgaattacttacaacattggtaatggacttggatcgcatggtttatgtttcatttaataataaagattcgaaaaatattgataaacacaagcaggtaattaggaatgatttggatgcattttttaattatatagttaaaacagacattccttctttataaaaagtttatcgtaatttagaattgttttggtgaaattgttatataataacggattttgttacgattttcagatttgcgttatgattcttttttgaattgacttccataaataggcctgatatactttaggtacatttatctccataccagactgccctctggtatatataatgggaatcggcaactttaccgattcccatttttaactataatttagtcttttagcaagttggtattgtggttggtattaagattcacttcttcctcgtaaaatcatccctcttttgaagggtggctttcaaaaaacatttaaattaaaaaaaacacgtaaaatcaatggttttaagcgctttactggtttactttcaaacggtttttaaacggtttttgaacggtttttatgggacattctttataagttatcttttatctcaaaacggcctttttagcccttttctttttttcaagttggtattgaattctccttgaaaatttaacattttttctagctctttaaacctaaatacggcccttttcaagggctttcctacaacgtaaggagatttaaggagttctaagggttctagttggtctctttttggattctatacgttaaattacagccgccccatttcacatactgctcataggggtacaggaccttgccgtccccgtccaggaagaacgcggtgtactgtccgaagagtacagggttcaaaaacattcccgctccgatgctcagcataaaggatacaacggacagcaccttgggaattcccagggacatgaagatgggaaggatgataacgccgatagctaccactgcaccggccccgaacagggaggaaaatatggcagccgtaacaatgcacaaaaggatacaggtgacggcgggcttgtcgccgcccagctccgtggtcttgcggataagggtggctgcgatgcctgtctctaacagcacccggccgaaccatgccccaaacactacatttaccagcactgagccccagccctccgggccgctctggaacaccttggaaaatgcctgtatccatgtaatccgtatgccgtctccattggctgcgataaattcaggattagacgccagaaggttgcctgtcatgggaaggatggtccagagaatggccataatcagcattcccatcatcaggtttccgcccctggccgcgtagacggccaggccaaagaacgatgctaaaatcagtattcctatgatatattccataagttaaatctcccctctatattgctattttagctctgtgcttcagcgctcaaggctgttaagcgtttcccacacctcgtcaatgaccggaattccgtctcttgtattggtctctctggtgatgagttccagttctcccggataatacacttccccgccttccctgattggctctgaggacttgatgtcggccagaatctcatccacaatggagtccgtttcctccggcgtgttgaatcttaaggggtcaatggctatcataatctggctcagtcccacctcgtccccaaaggtgccaatcctgctgacggaattgccgtttgtcagaaccgtcgctatcaggtccagggcaatggagatgccgctgcccttccagtatcccatgggaagcaccctccatgttttctcaatctcagccgggtccgtggtcaggttgccctttgtatcatagcctccgggaaccggaagctgctgtcccttaagctttgcctcctctatctttccgtaggaaaactgggatacggcgcagtcaatgacagcgtgttttccgttgcttctggggatggacatgataaatggattgtttccgatttttctgtcccttccgccccaggcaggcatgttgggcatggtgttggaccagcagataccgatgcatcccttgtccgctgcctgccagccgtagctgccgccccgcatccagtggttattatttccaagggccaccacgcccacgccgtactcccttgccagctccacagcccggtccatggccagctttgcattgagggggccgaatcccctgtgtccgttccaccgctcaatggctcccatggaggattcacaggttgcaatggcggcggaatcaatctctcccttatccagatactccaccaccctggggaagcggttcacaccgtgggaatatacgccgtccaggctgttgtttgcaaatacggtggccgcgtcctttgcatgctttcctgaaaaacctctgctctctaaaatcctctggaacttctctaataaatcctcatactttactctcatggctctctccttttatgttagctttctcttttttgagaaagcgctttctcatgacaccattatagcattatcaagatttatgtcaatataaaagtgtttaatctctttatctttatacaatttgcactatattgtctcatgctttttgtgcattataatcccgttttttcttgtttataaaagcgttttcttattattggaaaataaaaaggagttggaacaaattatctttgtttttaccaactccaattctaaaaaagcgcttttccgtattttctcataccaagccctgttctgtgttatacggctgtacgccggcaggacgcctgatatacccaggcaccggcactatgcgtgctgtcttacccaatctttcaaaataacgcggaaccgcgcaccaccagctccggctggatggctacacttgtggccgactcctttccttccatcctgtccctgagcagggaagcgcacattccgcccaaaagctccggcttgttgtccagggtagccagctcaggttcgcatattctggaatccggcgaattattgcagccggtaatggctatatcctccggcacccggtatcccctttccttaaattccttcatgagtccgatggccgtgatgtcttcgccgcacaccaccccgttgacaggccggccggcggcaagaatctttctggcggcatcccttcccccttccaggctgctttcatccacaatcaccacccggtcgtttccgtcaggtacatccctcagcttcatggcttctaaaaatccctgccgttttgccctgccgctgtctgtggcaatatcaaaaacatagaataaatccatacgcccatggtcaaacatataatccgaagccatgcggattgcctttgtgtcatccaccaggactgaataaaaattaggcagctttacctgtccgttggcaatgactacgggtgtatcctttatcttggcagtaatctcaggataatttatcagttcattgaatacagagccgatgagcacaattccgtctgtctgtttctctgacagtatctcgaaataccggtcgcattcctgtatggacccgcctgtattgcacaccgaaacattatatcccagattgctgaactcctgttcaatcacatatatcatcctggcataatgcgtcacccgcacatccactgtcaggatagcaatattcttcatggttttggagaccatgcccctggctatggcgctgggcttatagtcatactttttaagaacggcctccaccctgtcccttatcttgggattcacatttcccttattgttgagcacccgcgaaacagtggagatagaggtccctgcctcggctgcaatgtcataaatattcatcccttcaccccttttattcctttacacttctgtgctttcatcccctgctctgctcctgcttttttcgtgaaagccctttctctatattgtaatggacttttccggattttgcaagataaaatccagagggttctgacaggttgcgtaatggatatagaaccacatatggaattggcgatgaaatcgacaatggatttggcaatggaatgagatgttatacgaaacatgttatacgaaaaacagcagcccgccgcgtccctcccatgcagggcaacacgttttgctgctgttttttagcgccctaaggcatgtcccataactgtaaactatctttcctaaaactgcacaacatcctttatctcttccgcccgttccacatgttcggcataaaggaccggcccctcgccgtgataatccttctggtattcaatacctacctttgcccggaccttcacccactgttttgtcttgtaatcctccgcttccggccatttgcacataaagcccagaaacgtcatatccgcctcacagcatgtcatggccatgcggccaggcacaaactggcccttggggaatttaggagttttaagaaccatggcagtgaattccaccaccctgtccttatagcgctccggctggtccatacagtcaatataccaaataccgtaatcctcaggcttaatttcaatcacatccgcgccaagatcatagggaagatcctcctccagggcagcctgttcgatttccccttccttgtcctccaggacaatctcgctttcccggctcatggcccgtatggtcctgcggtacgcggtcagcttgtcatccccaatcccgtcgcaccggttcacgataaccagctccgatccccgcagcatggcccccagaagcggcttcatgttctgcacatagagttcaaaggtagaaccgtcaataatggtaatctgctgataaatggtccagtcatccggcagttttaattcatcctggttccacatgccgttccactccatcagcacgcgttccggctggtagataacctccagttcattgagatactggggggtcagcttctccatgtcatccacaaacaccactgccgtcttattcttctttaactttttctcgtcatactccgtatcgccttcctcacacacaatgagaagggtctttccctctgttttaaagtaatcctgctgcatggtaaaatccagaaactgggtcttgccggcctccagaaagccattgattaaaaacaaaggcataatatcgtcttctatctcataagccatgtctgtttccccttatccaatcagcctctgccgaacacgctgttcagctcttcctctttcaggctggcgccaatcacacataccttgcctgtataatccggtctgccctggcggatttcatactgctccggcaccaaatcaaaatacagccactcaccgggattctctgtgggaagcattcccttggcccttaacacatctccaaactccctggtggaggagagacgtttcagaatatcctccagctgctcatgggtcaccggaacaatggtttccattccccagctggtaaacacctcgtctgcatgatgatggtgatgctcatgaccgcagccatcatggtgatgatgcccatggcattcctcgtcatggccgtggtgatgctcatggcattcctcatcgtgatcgtggtggtgatgcccatggcatttctcgtcatggccgtggtggtgctcatggcattcctcatcatgaccgtggtgatgatgctcatggcattcctcgtcatggccgtggtggtgctcatggcattcctcatcatggccgtggtggtgatgctcatggcactcctcatcatggtcatggtgatgctcatggcactcctcatcgtgatcgtggtgatgctcatggcattcctcatcatggccgtggtggtgcccgcagcactcctcgccatgaccgtcatgatggcggctctcccgcacctctgccagcagatcatccagcatagtatccttcttctcaataatctccagaagctggcttcctccaagctggtccagaggagtggtgatgatgacagcatttgcattcttctcgcgaatcatgtccacatccttctgtattttagaggcatctgtaatgtctgtacggctcagcacgatggttcctgcattctctatctgattattgaaaaactctccgaaattcttcatgtacattttgcattttgccgcatccacaatggttacagcgctgtttagctccacatccatatctgccgatacgtcaatgactgccttcatcacatctgacagcttgcccacaccggacggttcgatgatgatgcgctccggcttgtactgtgtcagaacctcagccagggatgtaccaaaatcacctaccagagagcagcagatgcagcctgaattcatctcccggatttcaatgcctgaatccttcagaaaaccgccgtcaattccaatctcgccaaactcattttcaatcaggacaacctgttctccggcaatggcctcctccaggagcttcttaatgaacgtagtcttgcccgctcccaggaatccggagataatatcaatctttgtcattttattctttccctctttctcagtatccgaagccctgccagcccagtaagcaagtaaaaccatccgccgtcctgtcctggcaaagctctgtttgtaaagcctgtcaattgaatattgttgcacattcactggataaagtcaagacatatggccctattctattgctattctattaccgctctgtttctattctgccgtatcacactttcattttatccatattttaaccgttccaaagggtcaggtaagagtttttgagaaaaaatgcagcaaacagccaggcagaccttctcgcctgcctggctgttgtcccggtaccgcgggcctttcccattcttttttctttatctccgttctgcctgaccggctttcgccgtgctcagccggttaagtccatgattctgccggccagtttcctcttacatctcctcttacatatccaaatacatatgcatcggataggaaagatactccacatcctccagcttctccaccgtaatgtaacctgccggagcatttaaaatggtcggaatccggtttacaatggtggcgcaggtatgctccacagtggccggcttctgtacaaagaaggtggtgtcgggttcgcctatgattttccagtcgcacaaatcgccgtcatccggtccgtataccttgccgatgcactgggtctctataaccggaccctggaaggtctcggtggtgaccacggcgctcataccgatgcagtttccctttggtatggtcattcccatggtctctgaatacaggtccgtgggatagaaatatggcacgcacttctgggactgggacttgatggtccatcccatcttattacacagcgcttcattggaattccatacataacagggctccagtgtctccgggtgggcaatctgagcttcaaactcctccggtgtaagccccacgccgtgagcctttgccagtgccagaccgtaatcttcaacgttatagctggtggctccctcaatcctgttaatgcggtgtacgcctcccgccacacagccaatcatgttaatccagaaaatatcctgcataccggctcccactatggtgcaaccggtttccttagccagcttatccagcttgttggtaacagctgaggacgtggtccatggatagatggcctcctcgcaggtggtcaccacattgattcccctggacacgcatttctcaaaatagggatatacatccgacatgaagctgaacagggtaaccacggcaatgtcagcgtcgcactcatccaggaccgcatcagcgtcctcccttatcaccacgcccagctttgtgccaagccctgcaaaatcacctacgtccattcctaccacggccggattcacatcaattgcccctacaatctcagcgcccttttcataaagatagcgcaggatgtacttggccatcttgccgcagccatactgtaccacacggattttctcgcaattcatcatgattcttaaacccctttcctgaaaataagttacgtgttattagcttctgttaatagtataaagcttatacacggtatcaggtcaagggttatttttcctgaaagataccggcacctgaaggcgcaggaacatgcctctctcctgcatatccatgggcacctccgccaccacctcgcagatatagtcgcctgtcacctgataatcctttgtcctgatttcctccaccagacggcccatatattccttttccctttcaaatccattgcagtaaatgcacaggtatgtgctggccggtatctccgtaatcaggctgtcctttacaaagccccggtccaccagcacaaatatctccgtggaatagtacctcccctccatcaggtgttccctgcgcatcacggtgcctgcattgtaaaaataaatgggggagagctggttggcaatcaggttctccttcaaatccctcagtatcttttcatatacatcaatgtcgtaatcatagaaattcactcctgaatccgtcatatacgtcagtctccggggtatgtattccagcacaatggtcccgtccggcggcgcgttttcataccattcatagctttcaagggtccgctctatggcccttctctggtacatcagctccctggatctcaactccagctcctccaggttccggtgcaggattgtcttgaacatatcaagctcaaaatgggtcatctgctccctgatgtcctttaaggacatgcccagggccttcatatgctgaatcatatccagctgggcgctctggcggatatcatagtaacggtagccgttttccgcatcccggtacatgggtgaaaacaggcctgccttgtcatacagcctcagcgtctgctctgacagcccgttaagccgggccatctgtcctattgacagttctttcacagtgtgcacctcctctttattatgtataacttccaattaaagcgttatttacaggatttgcatagcataattatactaaaaaaaccttataccggcaataatgtttccgacgtcttattgaaaattcgtcttacatttaacactcaaacttcccctcccccacctctggccctcttcagcagttacagacaccgcagaacgaaaacaaccggagaaacagcagcctgtcaacacaggcagccatttctccggccctattatccgttggactcatcatccttcttatacatttttcgtcagatgcttcacaatcttctccgcatcctcctgttttccaatcaccatcaggtggttatcccctgctatgacatggtcggcaccgggcatgaacctcatgtgtccgtccgggtttttcaccgcgataaccgatatgccgtacagccgccggatatcggaatcctttatgctctttcccacccactggggaaggggcttgatttcatagatggaaatgccgtctgccagctccgtatagtcaaacacattgttggcgctgtaacgcaccgctaccttctcggccacgtcccggtccggataaaccacctcgtccgccccgttctttagcagcagcctggcatgaatattgcggtttgccttgctgacaacgtactttgcccctatctccttaatcagactggtaacctccagactgttctgaaagttgtttccgatacagataaaacagatatcgaagttgccgattcccaggctcttaagcacggcctcattggtacagtctccaatcttggcgctgaccacatatggaaggacgggctccagcttctcctctgatatgtccactgccatgatttgattgtcatgcttggccaggttttcacacaggtgctggccaaaccttccgattccgataacaagaattgatttcatctctaatacccctctctatcctatggtaatccgctctgccggcagctgcacatggggcttgcggttggacctggtgaatgccagggcaaaggacaagcttccgattcgtccgcagtacataagcagtataataacaatccgggaaaatgaattcaggcttctggtaactcctgtgctcattcctgaggtgcctatagcggaacatgtctcaaagaacacatccgacataggcaggttctgggacaccataatggctatggtggctgccagcatcagacccaggttgatggtcagaatacaggccgactgcctgatggactcgtcctccagccttcttccgaatatctccaccccgtatgtctggcggatattggaatggacgtaaagcagaagcactgccagggtactggtcttgataccgccggccgtggagcccgggcttcctccgatgaacatgaggatggctgacaaaaacttgctcccgtctgtcagggctgccgtgtctacattattgaatccggctgtcctgggtgtgaccgcgctgaagaaacaggccagaaaggactcagaaccattcattcccaccagaatattattgcgctccatcagataaaagagtatggtgctggtaatcagaagaactgccgttgtaaccagcacgattttggtgtgaagcatgtagtggcggaaatccagcttcttcctggacaaatcgtcccagacaatgaatccgataccgcctgtaataatcaggaaggatatagttcctataaccacccagtccccctcataattacaaagagaactatactggctggtgtgtcccatcaggtcaaagccggcattacaaaaggccgaaacagaatgaaatattccataccaggtaccgtggaccagaccgtactccggaataaaccggcaggccagtataacagcgcctgctccctcaaaaacagctgtgccgatgatgattttcttggccagcttcaccatgccgccaatctgcagggtgttgacgctttcctgcataagcccccgctctttgagtccgattttccttctcagaacaatagacaggaaaatgccgatgctgataaatcccaatccccccagctgaatcagcaccagcagcaccacctggccaaacaggctccactgggtccaggtatctgccaccaccagccccgtcacgcaggaagcgctggttgccgtaaacaggcagttgaggaatggctcgctctgcccgtccctgctggctatgggaagcatcagaagcaggcttcctgtcatgataatcaggaaaaacccataggcaatgaactgggtctgtgatatatgtttttttaaacggtaatgttttggtttttttccaaacagcttctcattcatgttcccctcattttaaatcccataagttatttttaccgcggatccctccgcataaagagcattttagcactttagccccggactgtctactgcaaaacaggatatagcccacggataaaacagccggccccggccggaggcatcagcctctcaggcggcccagggactgccacgccatgaacaaaaggaaagcgcacagattcaccaccaccacgctggccccggccggtatggaaaactggtaggatgccaccatgcctgcgaaaaagcaggccagggacagaaggcccgaggacaccatgacgcctccaaagcttttgaatacccgcatggaggaaaggcatggaaatatcacaaggctggatataagcatggcccccatcatcctcattcccagcacaatggtcactgccgtgagaacagctataatgatattgtagcggcccacattgacccctgttgccttggcaaaattctcgtcaaaggtcactgcaaatatgcggttgtagcatattacaaacagccccagcaccaccagggacagcaccacgctgagccaaacatcctccctgctcatggccaggatgcttccgaacatataactgctcacatccgtggtcatacccgtggtcagggaagtgacgatgatgcctagcgccagggcgctggctgatatgagggcaatggccgcatcgcttttaatccggctgttctccgtaatccgaagcaggaaaaaagcagccaggaccaccaccggaatggatatcttaagaggggaccatcccatggccagggcaatggaaagggccccgaaggacacatgggacaagccgtccccaatcatgctgtaccgcctgagcaccaggctcactcccagcagggacgcgcacagggataccatcatgccgcccgcaagagcccttaccagaaacgggtaggaaagcatttctcgtatcagattcatgatttatcctccttgtgcatgtgcagcttcaccgtgtggcatccggctgtgggcttgcatctgccctgttccttttcatggaagaaatggccggctgcctggctgttcatatagtcgtgggcaggcccgtagaacaggacacgcttttgcaggtgaaggatcttattggcctcctccaccgcatttctcaggtcatgggacaccatgagtatagccaccttgtcttccctgttcaacctccggatcatggtgtaaaactcctggatggccgtggggtctaacccagtgatgggctcgtccagtatcagcagggagctggtggcgcacagggccctggctataagtacccgctgctgctgcccgccggacagctccctgtagcactgcttcctgatgggtgtgatccccagcttctccatgttcctgtccgcaatctctttttctttcttagaataaaacggaagcattcccctgcggtttaagcagccgcttaagaccacctctgagacagtggcaggaaaatccttctgggcggccgtctgctggggcaggtagccgataccggtcctctttagctcatctgccgttacaagcgttccgcccgtaggcctgattaagcccaaaagccccttcatcagtgtactcttgccggatccgttctcacccacgatgcacagataatcccctgggtccacttccatatttacatcggtcacagcatcctggttatcgtatccgaagtccacatgctggcattgaattaatggtgacatattttaccccttttacaattggttattccagcccggattatcccggctcaggttattccagcccataccgcaggttctccacattctgtttcataagctggagataggtgacgccctcgtcgaactgcttcctggtcacgttgtggcaggaatggagaagaaggggcattgctcctgtttcctcctgaatgatttccgctgtcctgtggctggaaagctccaggtaatagacagccggaatccggtcctcctttaccttgtctatcagataggcaatggtcctggcgctgggctccgtgtccccgctgcacccggaaaaggcagcgcggtaggaaaggccgtactcatccgcgaaatagcggaagggaaacttgtctgccaccacaatcatatggagacgcccctggtttaccacctgtcggaactggctgtccagttccttaagttccttcaggtatgcctgggtattatcctcaaaacggcttttctcccggggagctgcctctgacaaggtctggcttattatttttacaatggcccgggcattgacaggggaggtccatatatgctcatcgtattcaatgtgcatctcaaagccgtcctcatggcggtgttcttcctcctcctcctccatgccttccacatgctcttcctccaccacgtccacatagtccatcatggtcagaaccttcatgtggctggtgtccagggagcccagcactttctccacccactgctccatctcgccgccgttgcagatcagcacatcggcctcctgcatggcaatcatatcagcaggcgtaggttcaaaggaatggctgtccatacccgcgggcaccaccagcttaagcttcacccggtcccctgcaatctggcgcacaaaatcatagtagggaaagatggtggttaccacaaggatgcggtcatcctttccctcctggccggcagcaggcgcctttcctgattcaggcggcctctgtccggcggcgcatccccatatacttatggccatgaccgcgaaaccaagcaaggccatgagccacgtaattcccctgtatctcaggggcattctatcattcaattccattcacatcctttatatactgaacaacctgggacggatggtccgcaataagcgccggatggaaagccataagctcttccctggtcctaaatccccaggtcactcccactgtatccacctttgcattgtccccggtctccatgtccgtgttggtatcccccagatagaggatttcgctctttgaaagtcccagttcctccgctatggcccatacgccgtcagggcaaggcttcttcttaattcccttatcctcctgctctccgtagaccaggtcaaaatacccctttccaaacactccctgcacattatccagtgttctgggatggggcttgttggacagcactgcaatgaaaatgccctgcgactttaaaaactccagaagctccccgattccctcgtatgcctccacacggtacatacagcattcccgaaaaatgtcctgataccgctccaccgcctcctcataatgggtcagctccttatccccgcaggcaataagggaccgctccagcagcttcttataaccgtcccccacatagagccggctctcctccacgctgatttcacgcatgttccaataactcagggtatcattcactgacttctggatggcatagattgaattcacaagggtcccgtccaggtcgaatatacagcatttatacattatggttaccattcctttccatggctatacgcaaatctgtcttgacacaacctacatcatagcacagttccatctgtttttccactgcatttgacaccgcacccctggcatgctatacttttttcaacacaagacagctaatttttcccactttaaaaggagcaaaccatgacgaattcctatatgattacctgctgttccacagccgatctgccggcgtcttatctgacagagagaggcatcccctactcctgctttcatttccggatgaacggcatggaatatgacgacgacctgggaaagtccattcccattgaggatttttacgagaacatcaggcagggcgccatgcccaccacgtcccaggtgaacccggaacaatacgaagccatgtttgagcccatattaaaagaaggaaaggatatcatccacatgaccctctcctccggcatatccggcacctataattcggcagtcattgccagggatgagatgctggagcgttatccggaccggcagattgccgtcattgactcctgctgcgcctcagcgggctacggacttctggtggacacggcctgggagatgatgcaggcaggtgcagaatacagggaacttgtatcctggattgaggagaataaaaaaagggtccatcattggttcttcacctctgatttgacccatttaagacggggaggacgcatctctgcctcagctgccttctttggcaatatgctcaacatatgtcccctgctggaagtgaatgcggaaggcaaactgattccccgggacaagtaccggggcaagaagcgcgttatccgggaaatggtggagcggatgaaggaacatgctgaacagggcgatgcctataacggaaaatgcttcctgtcccaatcctcctgccccgaagatgccgaggcagtggccagcctggtagaggaaactttccctcatttaaacggaaaggttttcatcgtggatatcggcactgtcatcggctcccataccggtcccggcaccgtatgcctggttttctggggagacggcagaaccgtgtagagtgtgtctgaaaactgctttctgacgcgccccggccgcgctccggccctttaggttctctgttctttcatggacatcacatacagagccgcaaaacccgcagctccggctataagggccgctgccagatccgcgcctgttgggatacctggaaaaagttccggcagggaaccgaacatgaatcccaggataatcagataggtgggctggggatgacgggacatcagccgctccagcaccttggtggtcaggaaaatgccgcccagcacgccggctcccagcggtatcaggggaaggatatgaaaggagctgatgtttcctataatggtttcatagattcccagcatatagagcatctgagacacgctgattccgggcaggaccagccccaccgcaatgatgaatcccccagccagctgaaggagcagggccgcgggcccgaaacttccgtccggtgtaaaaagtccggagggaatcagcgccagaagcaccacccccaggatgcctatggcaggataggccaccgctcccaggtccagttttttcacgcctgcctccctgtatatcatgggaacacctcctgccaccgctcccaggaagaaaaaccggagcggaacatcggccctggttgtgaacaggtagctgataaagcgcgaaaacagcaccattccggttcctgcccccaggacgaatttgagcaggaaggccatgcttcctgcaggttccttgaaaaaggagctgatggatgaaatgagtctgtcataaacccccataatcatggccatggaccctccgcttactccgggcaccgtcatggtcccccctatccacattccttttaaaatgattttcacattatctcgattcactggaaatactccttttcaccttctgtgaccttactgcacgcgcgtcccttccggaacaacagtaacgatattctaccccatgcagccggaaaagtgaattaattttctgtatatatttatgtccgggtacggcttattattgccccggacatgaaaataatcccggaggacaggcagttctgcctttctccgggatttatttttgaggaatacgattatgtgataatgaaacggaatatggatccgatgtatttaattaatgtatttaatcaatacgcttaattaacaccgcactgggaatttccaggcatcatgccgactcccatctgtgacagcatggaattcaggtcctgtccgcccttctggtactgtactgcctggggacaatttcccgtattgtaaagtgctgcgttgcagtcatttatatttgccatattagtgccgcatgcagaacccagcattgcagcaagtgccatagatgaaactgataacatagtatgtcctcgctttctttcttacagatattacaaatctgttacatttctgttgcaaaactatattatcacatattaggagtcctgtgtctgggagttattggaaaaacaacgacttttgtctttttttgcggatttttcatgttctttggtaatatttccccaatatccctcatatattatcagtattatgtaattgacgcaaacaaaaaaatacgcatgataccagcgccggttttacttataactgctgcatgcctgctgtacagcggacaggccggtcaggtacgggcatggcaatcacgattaagacaggggttgtatattatactatgttagaatatgtaaagaaaaatttatcctgtatctttcccgcacaggaccatggcaaaggatgtctgtgtgcggacgaaatttacgatacggtgcagaccatgaacatcagccagaccttgaattattccatccttttaatcattatggaagccttcagtctaatcgtatatctggccacagactttacaggcagagctgcttccatgctcagctttaccatgctgctgttccttctgttcatcgcctttaatattgtatattgcaaatacttattgaaacagcagcggacctgttccacaaggcggaggctgaaacaccatacatactttttcactgccatatttgccctgtactgcattgcagtgaaccacatctgcctgcagagccgcctgacagcagaaagcgtccttatgttttacatttacattgccgccggccccatctattcccttacagaagcgctggcctcagtgctggctaccgccctggccgcgattccggctttcagggcccaccatgtaccgccggccctgtattccaacctgttcctttacagcttcatcagcctgtttctgtcccagatgcgctgccacattattgtgagcaacctgcaaatggtaagaaaggccagggatgaacaggtttgtcttcaggaacgggccgacaaggacccgctgacacagcttttcaaccgcaacggctattccctccggctggaggagctgattccctatagcatacggcttcatgtacctgtggctgtcatcatgatagatattgactatttcaaacagtacaatgatacatacggccatgtacagggcgacgaatgcctgaaaaaggtagccgcagccctgtccggcagcatccaccgtgagaacgacctgatctgccggtttggaggggaagagtttcaaatactgctctgtgatgtccacccctctgacgccatcaaggttggagaccgcttgaggaaatctgtggctgatttaaagattcccgctgccaaccgaagcgcctccccctttgtgacgatcagcgcaggggtcgtgagcacagttcttacctccatggatgattaccacaagctggtacgggcagcggatgatgagctttactacgccaaaagccacggaaagaatatgatttccttccgggaactgaatccggctcccagctccgacctatccctggaggacaaactggagcacgcaaaacttatatatgacagcatccccttcccctttgccatcattcaaattcaggcaaaggacggacaggcctgtgatttttcctatgtatatgtaaatgaagcctgtgcccgcctggaatgccgttccagaaacatcctctaccgaaaaagctttctgagccattacccggacgccgatacgcggcgccttcccgcctactatgaaacagccatgcacggcgggcggcagatgttttatgatttcagcccggaacgcagcaagtaccttaagatagagtgctttcaattccacgaaggctactgcggctgtctcattgaggatgtaacggaccagcactattttgagctgtacggcaataatgagctggggcttctgaaccaggtggtaaacggcggcatcctcctgaccagctaccaggcagaatccccggaggtcatatatatgaattccaggctgcttcacgcccttggctactgcagtctgtccgaatacaagcttttgtccggaggctccttatcgttcctcaggcagttgcacccggatgacacccatacattccaggagaccatgaccgtattttccacagacgacaccgtacgcagctgcatcatacggattcgcaggaaggacggtgcatggctgtggttcatgctcagaggcaaactgattattgacgaacacaaaaatcccctcaacctgttcactgtctaccacattacacgtcagctgaaacagctggggcagatagttcctcaggtggatggggattcccgtatcagtctatgaaaacgcaggagcttcccggcgctctaagcgccgaatacctgctccgcataatttaccgatgccatagcatccctgcaataggcgtcagcgcctatggtcctggcataatcctccgtcagcacagcgcctcccaccatcaccttgacagtgacggatgcagcccttagctggcggatggtttcctccatgctgggcacagtggtggtcatgagggcgctcaggcccaccagggcaacctgccgttccacggcctcctttacaatgacctccggcggcacgtcccttcccaggtcgatgacctcataactgtaattttccagcaaaaccttcacgatgttcttgccgatatcatggatgtcgcctttcaccgttgccaggatgatggtacctttcttttcctgggcctgtccgcttccatccatagctgccttgataacctcaaacgcagccttggcggcctccgcgctcataagaagctggggcaggaacacggttcccttctcaaacccttttcccacacggtccagggccggtatcatctcactgttgataatatccagcggctccctctcctttaacagttccgtcaccgcgttgtgggcggcttctttcaggcctctctcaatggctgctgtcagagccggcccctggcttcctcctccttgatcctctcctgatccaaaatgattgtctgcctttatcccgttctggctgccgctctttccaatggtctggcccaggcccgcgctctgtccgctgtacacgctgatatactggccgcactggggatcccggtccataagcgcgttaaagctgtagtaagcccgcatcatggcctcggagttagggtttatgatggcagctcccagcccgcattccatggccatggtaaagaatgcggcattgatgatttccctctggggcagtccgaaggatatgttggatacccccagcacggttcccactcccagctcatcccggatgcgccgcagggtctccagggtagtaagggcccctttgctgtcggaactgaccgtcatgcagagtccgtccagaatgatatcctccggcccgattccgtactccgctgcccgttctatgattttcctgcccacggccagacgtccatctgccgtatcgggaatgccggactcatccaggcagagtcccaccgccactccgccgtattttgccatcagcggaaatatgcggctcatggactcttccttgccgttgacagagttaatcaacggttttccgttgtatatacgcatggcgcgctccatggcttccatgtccgaggtgtcgatttgaagaggcaggtcgataatggcctgaagctccctcacagcctcctccatcatggacggctcatggatttcaggaagtcccacgttcacatccagcacatccgccccgttgtcctgctggctgaccccctccttcaggatatattccaggttgtggtcccgcagggcctgcttgaacttggacttgccggtggggtttatgcgctccccgataatgattgtcttacggccggcggtcactgcctttgcataggaggacaccacagtgcggtgttttttctcgggccacaccacaggcatgtccttacaccgctgtgtcatcaggcgtatatgctccggggtggtgccgcagcaccctcccaccaccacagcgcccatggccgcgatttcctccatgacaagggcaaagccctcagcgtctatgtcgtacaccgtcttcccgttctcgcttctgggaaggcctgcattggggtttaccagcacgggaagggaggacaccctcagaatttcctccaggatacccttcatctgcacaggtcccagaccgcagttgattcccagggcatccaccctcagtccctctaacagggccacggtggactccacgtttccgccggtcagaagctttcccttttcatcaaatataacggttgcgaacacaggcaggcgttcccctgtatccggcctgaatcccgcctccctggcagccagcaccgcggccttcagctcatagctgtcgctcatggtctctataagaaccaggtccgctcccgccctggcgccaatggataccacctctttataaagcttcaccgcatcctcgaaatccaaatcccccaaaggttttaacaggcgccccgtaggtcccagatccagggccacgtatccgtgtcctgcttccctgaccgcggttctggcattttccactgcggctgtcacgatggactccaaatcatctttaaacttaagcctgttggcgccaaatgtattggtggtcatgatgtctgcgccggcctccagataggaccggtgtatggatataagcacatcccggcgggtcaggttccacgtttccggaagctctcccggtttcaggccctgggcctggagcaggcttcccattccgccgtcgcagaacaggcggcgtaccttcatctcttctaatattgtcatcatcattctccgcaagtcctcttaactgttcaaaatgtcgtttaccaggatgtccacctgctccccgctggtaatccagctggtgcagaggcggatagccgtatggctttcatccacccttccctggttggtgtaactgtacttatccttccacgactccagaagggaatccggcatgatgggaaatacctggtttgtggtgttttccaccaggaagggatatccctttttgacacaggcgcagcgtatcttgtctgccagcctgtccgcatgggctcccagctcaaaatacaggccgtcccgcaaaagctctccaaactgtatgcccagaaggcggcccttggccagcataccgccccgctgcttgatatggtagcggaaatccgccttcagctcatcgttcaatataaccacggcctccccgaaaagagcccccaccttggttcctccgatgtagaatacgtcgcaggaagctgccagggacttaaggtccaggtcattcccctgcgccgccaggccgtatgccagacgggcgccgtccacaaacaggtacaggccgtacttcctgcacaccccatacaggttctccatctcagccctggtgtaaatagtgcccagctccgtggggttggagatatataccatctttggctgcaccgtgtgctcaaagctctcgtcccggatatgggcctggtacagctcctccacctgctctgccgtaatcttgccgtcctcagagggcagggccagcaccttgtgtccggtggcctctatggagcctgtctcatgtacattgatgtgggccgtcacagcccccaccgccccctgatgggaacgcagggcagatgctatgaccgtcagattggcctgggtgcctcccaccaggaaatggaccgctgcatcttcccgtccgcataggctgcggatgatgcctgcggcctctgcgcagtaatggtcctccccgtatccgggcgtctgctccagattagtctcagccagtttcttaagtatgcgctcatgggcgccttcgctgtaatcacaattaaaacgaatcataatataattcccctttttattttatttttatgccgccgccttaaagggcttttccctgtcacctccggtaggggcagtccgtcttggcacaggcttcacagccttttacatcgcagcggtaaggtttcctactggctcccatgaccgctgaaacagatttggagggcatcatgagaagactgtccgtcagcttgatgccgatgcgttttccggcctccagggcctctaacagcatgccctggcattccagcggaaagtctccgtaaccggggctgaacctggggcgcagataacggccttttgcctcatattccgactttatcacggtacacacctggtcgcagtactcctcaatcatggccgctgccgctgcctgcatgaccacggccctgctcatctggagacggctgtacttctgaatcagatggtcggccccgcagccaagggtggccgcaaacacaataatctgatcgcagtccttcagattcccccacaggttcctgctcctggcgttgaaacatcccccgtcaattctgtaatcctctcccagtgacaagggatattcccggtacagatgcctgggtgtggcagcttcccataattccgccatggactgctccaccatggccgccactgccccgtcagcctcctgacccctgtaccccagatagcggaggacctccctcctgtctacgtcctgtatgtccatatgtcttttctcccgatgttcgttcttctgatattcgttttcccgacattcgttcttctggtattcgttcttctaagttttattctctcggatatagtcatgaggttttttctcgtgagttttttctcatgagtttttttccagtgttgcattcagccctataaaatctccgacaggttttcttttatcttcatggccacatccggcttattcatggaatacacatggataccgttgactccgttggcaatcaggtcaatgatctggtccgtggcataggctattccggcctgcttcatggccgcgggattgtccccgaaccggtccacaatggacatgaacctggatggcaggtaggtccccgacatctgggtaatcctccgtatctgctttgcgttggtcacaggcatgatgccggcaatcacaggcacctggattcccttttcacggatgcggtacagatagctgtaaagaatgctgttgtcaaaaaacatctgggtggtgacaaaatcgcatccggcctccaccttctgcttcaggtaatctatgtccacagacttgttggctgattccacatggccctccgggtaacatgctgccccgatgcagaaatcacctgcctttttgatttcccgtatcagttctgaagcatagtggtattcctttggcgtgctgccatcctgggggatatccccgcgcagggccagtacattttcaatgccgcgctcccttaactcacccagcacatggtgcaccttttccctggtggatgaaacacaggtgagatgagccaggggcgtcactccatattcctccttgatggcggaggcgattccaaccgtatattcgctggttccccctcctgccccgtatgtaacactcataaacgagggctttaattttgcaatctccgcggctgccttctccacggaatcatatgcatcctctgtctttggggggaacacctcaaaggagagggtgggctttccttctgacagtatgtcgcgtattttcatttctgtttcccttcctcatgcgtcatccaaaaaagctccggcaccccaataatcaggattgccggagcaagcatttacatttctacggtcactttcttcagatgccagatatccttcacatactcctcaatggtacggtcagatgtgaactttccgcagttggccgtgttaaggatggctgccttagcccaccacgcctggtccctgtaagccttatccaccctctggtgcgcctcggcataggaacggaagtccttgaggataaagtaggtatcagccctgtcgctgctcttggtatttaagagagagttatagatatccctgaacagctctgggttatccggtgcatagtatccgttaatcagctgcatgagcacacggcggatttcctggtcattgttaaagatatccatggggtaatagccgccgttgttctcgtagttaataacctcgtcggaggacatgccgaagataaatgcattgtccgctcccacttcctccacgatttccacattggctccgtccatggttcccagggtaagggccccgttgagcataaacttcatattgctggtgccggaagcctccttgctggccgtggatatctgctcgctgacatcagccgccgcaaatataagctctgcattggatacgcggtaatcctcgatgaacaccaccttaatcttgccgttaatggacttgtcattgttgatgacatccgccactgagttgatgagcttgatggtcagcttagcccgcttatagcctgcggctgccttcgcgccgaagataaaggtcctgggaatcatatccatatcaggattatccttcagctggttgtacagatacatcacatggagaatgttcatcagctggcgcttatactcatgaagcctcttgacctgcacgtcgaaaatagagcgcgggtccacgtcaatgccgttattctcctttatatatctggcaaggcgcagcttattctggtacttgatgttcataaactcaaactggcacttctcatcccctgcaaagagttccagcttcttgatgtggggaaggtcggtaatccactcatcgccaattttggaggtgacccagtctgccagcagcggattgccgtgaagcaggaaccgtctctgggttatgccgtttgtcttgttgttgaacttctccggcatcatctcatagaagtcttttaactcctggtgcttaaggatttctgtgtgaagcctggcaacgccgttgacggaaaagctggctgcaatcgccatgtaagccatcttcacctgtccgtcgtaaataatggacattttgcgcagcttctcctggttgcccggatacatggtctgaatctggttctggaacctgcggttgatttcctccacaatctggtaaattctgggcagaagccgtgagaacagctcaatgggccacttctccagcgcctctgacatgatggtgtggtttgtataagcgcaggtcctggtggttacctcccacgcctcatcccatgtaagtccctcctcgtccagaagaatccgcatcaattcagggatggcaaccgtcgggtgggtgtcgttcagctggaacactactttttcatagaattttctgatgtcatcgtgcttttctttatactttttaaccgccctctgtacgctggcggaaataaagaaatactgctgcttcaggcgcagttccttgcctgcgtagtggttgtcattggggtaaaggacctccacaatggttttggccagattctcctgctccactgccttctggtaatctcccctgtcaaaggaatccaaattaaaggtgttgatgggttctgcatcccagatacgcagggtattcaccacattgttgccgtatccaataatcggcaggtcatagggcaccgcgcggacagactggtatccgtcctgtacgaaatggttcactccgccctggttctcaatgcgcacataacctccgaatttaatctcggaagcatactccggcctgcggatctcaaaggggttgccgtcctttaaccagttatccggcacctccacctggtaaccgttctcaatcttctgcttgaacatgccgtagcggtaacggatgccgcagccatatgccggatatcccagggttgccagcgaatccaggaaacaggccgccagacgtcccaggccgccgtttcccagggctgcgtccggctcctggtcctcaatcacatttaaatcaaagcccatctcatccagggcttccttaatctcatccctggcgcagatattgatgatattattgcccagagcacggcccatgaggaactccatggacaggtagtatactgtcttaacgtcctttttctcatattccttgtgagtggcaatccactcgtcaatgataacatccttcacagcataggccactgcctgaaatacctgctggggagtcgcctcatcaatggtccttcggaacatgttctttacgttgtccaccacactgcgcttgaacgtttccttatcaaatcctttattcatcggccattatcctcctgctttaagttcctcttctattacagaactattgtatgtaaatcattcccaaattatcagacggggcggggttttatgggccccgcctcacaatcttaccattatttcatggtcttttcaacaccgagcattacattttcgccgttaatgttccactctttaacaaagccggacatggcgccgatgctgatatggtccgccatgacctctgttttgatctcgtccgcatgggccttaatcagttctgcaatccggtcatttccatcctggaatacgctgatgtggtccatgacctcaaatccggcctccttgcgcatggtctgaatcttgcttatgagttctctcacaaagccctcctcaatcagttcaggagtcaggttggtatccagcacaacggtcacatagttgtcttcctctgtcacatagccgtccttctgggaaacatcgatcagcaggtcgtcctttgtcagcaccacttcctggccgtcatagtcaaaggtaagctgtcccttctcattcagggtatccatggcagcgctgccgtcgatatcggtcagagtctggcgaatccggtttaacagcttgccgtactttggtcccacggtctttaactgaggcttgaaggtataggaggtaaattcccttacatcatcggagaaaatcacctgcttcacattcagttcttcctcaataatctgcacatagaaccttgacagctcatggtcggccttcacatacatccgggcaatgggctggcggttcttgatgttggccgcattcctggccgcacgtcccatgacaaccaccttcagcacttcatccatgtcggattccagctccgcatcaatccaggactcattcacctccgggaagtcgcacaggtgtacactttcaggcgtgttcccgtccacctttctcacgatattctggtaaatctgctctgtcataaacggaatcatgggagcagccgcctttgccacggtcacaagggccgtgtacagggtcatgaaggcattaatcttatcctgctccattccctttgcccagaagcgctcacggcttctgcgcacataccagttgcttaagtcatccacgaactcctggagagatctggctgcctcaggaatctggtaattcatcaggctgttatccactgtctttaccatggaattcatcttggacagcatccagcggtccatgaccggaagcttgtcgtattccagggtatatctggtgggatcaaaattgtcaatattggcatacagcacccagaaagcataggtgttccaaagggtacccatgaacttgcgctgtccctcggtcactgccttatcctggtagcgctttggaatccagggagcgctgcaggtgtagaagaaccagcggatggcgtctgcgccgtgggctgccagggtatcaaagggatccactgcattgcccttggacttgctcatcttctgtccgttctcatccagcacaagccccatgacaactacattttcataaggcgccttgttgaacagcagggtggactcagcaaggagggaatagaaccatcctctggtctggtccactgcctcggagataaactgggccgggaactgcgactcgaacagttccttgttctcaaagggataatggtgctgcgcaaagggcatggctccggaatcaaaccagcagtcaatcacctcaggcacacgcttcatgggcttattgcacttggggcacttgatgtttacaacgtcaatatatgggcggtgaagctcgatttcatcagggcagttgtcggataagctctttaattcctcgatgcttccgatggaatgctggtgtccgcactcgcactcccagatattgagcggggtgccccagtaacggtttctggaaataccccagtcctggatattctccagccagtccccgaagcggcccttgccgatggaatccggaacccagttaatggtattgttgttgcggatcaggtcatccttcacagcagtcattttgatgaaccaggactcccttgcatagtaaatgagaggggttccacagcgccagcagtggggataactgtgctcgaagctgggggctgagaaaagcagccctctggactccagatcctttaacaccagggggtccgcatccttcacaaaggtgcctgcaaaaggcgtatccgccgtcatatcgcccttggcgtccaccagctgcacaaagggaaggtcgtacttgcggccaacgttggcatcatcctcaccaaaggcaggtgcaatgtgtacgatgccggtaccgtctgtcagtgttacatagtcagcgcagaccacatagtaggctttcttgtgctgcttctcgcacaggggcacggagcagtcatagaggggctcatattccttaaactccaggtccttgcccttgtaagtttccagcacctcatagtcttcacccagcacggtatctgccagggcctgagcgatatagtaggtgtagccgtcgcctgtctttacttttacatagtcttccttggggttcacacacagggccaggttgctgggaagggtccacggcgtagtggtccatgccaggatatatgcgtcttctcccttggccttaaagcgggcaatggcggaacgctcctttacatccttataaccctgggccacctcatgggaggacagcggggtgccgcagcgcgggcagtagggaaccaccttaaagcccttgtacaaaagacccttgtcccaaatctgcttaagagcccaccactcggactcgataaagctgttgtcataggttacatagggattgtccatatcagcccagaagccaacggtgttggagaaatcctcccacatgcccttgtacttccagacgctttccttacattctttgataaacggctccagaccatactgctcaatctgctccttgccgtccagtcccagcttcttctcaacttccagctccacaggcaggccgtgggtgtcccatccggcctttctcggcaccatataccccttcatggcccggtatctgggaatcatatccttgattacacgggtctccacatggccgatatgaggcttgccgttggcagttggcggtccgtcatagaatacatagggcttgcagccctccctcattttaatgcttttctcaaagatgtgctctgcttcccagaacttctccacttctttttcccgttccacaaacttaaggtctgtggggactttgtcatacataacgtcttcctccgttccattcatgatagatttctattctggtatgtgaaaaagattgtatatccttccatgaagcaaaaaaggcttccgtcccgaacaggacgaaagccataaaccgcttcgtttaaccacctattactgcataccatcatatgagttcccttaacgcgggaaacgcgtcccggcctatcatgcgctgctgacgcatcccttcagccggacagctccggagtgatcttcagttctgcattacttgcaccggtttccaccatctccggctctctgaggcgttcctgcaggcctactgtctccatctatgcctttttcatttaacttctttattataataatgcatgcgtaaaatgtcaaccgtgtatctgattttcgtttattttgacatatcagttgttccgcctttgattgttaaatttttatcatttcgtttgccttttccagaatatgtgttatactactaaccaatattactgcacagccgtcaaaatcctgccgcaccgcataccctgcgtacagcacaccggctgcgcccagggaggaacctatatggagcagagaaatcttaccttactcacagacctgtatgagctaaccatgatgcaggggtatttcaaagaaaaggacgccaacgaaaccgttgtattcgacatgttttacaggaccaatccccacggcaacggctttgccatctgtgccggattgcagcaggtcattgagtacattgaggacctgcattttgatgacagcgacattgaatacctgagaagcctggatatgtttgaggaggactttctgagctatctcaacgaattccgctttacaggcaatatttacgccattccggagggaaccgtggttttccccagggaacctcttgtcaaggtcattgcccccattatgcaggcccagctcatcgagacagcactgctcaatatcatcaatcaccagagcctcattgccaccaagacagagcgcatcgtttacgcggccaagggcgacggcgtcatggaattcggactgcgcagggcccagggaccggatgccggcacctacggagcaagggcagccatgatagccggatgcatcggcacctccaatgtactctgcgggaaaatgttcgatgtcccggtaaagggaacccatgcccacagctggattatgagctttcccgacgagctgaccgccttccgcacctatgccaagctctatccttccgcctgcattctgctggtggatacctatgataccttaggttccggcgtccccaacgccatccaggtatttaaggagatgagagaagccggtattcctcttaccttctacggcatccgtctggacagcggtgatttggcctacctgtccaaaaaggccaaaaagatgctcaacgaggccggattcccggacgcagtgatctccgcctccaacgacctggacgagaacctgatcaactccctgaaaatgcagggagccaccatcaattcctggggagtgggcaccaacctgattacagccaaagactgtccgtccttcggaggcgtatacaaactggctgctgtgatggacaaggccacaggccagtttgtgccgaaaatcaagctgtccgaaaacgcggagaaaatcaccaacccgggcaacaagaccatacagaggatttatgataaggccaccggcaaaatcatagcagatttgatttgtctggtgggcgaggaattcgacacccgcaattccctccttctcttcgaccccttagagacatggaaaaagaccatgctggcgccagacagctataccatgcgggaactgatgatccccattttcctggacggcaggtgcgtgtaccagtctccgaaggtaatggatatccaggcctactgtaaaaaagagctggataccctgtgggatgagtccaagcgtctcatcaacccccacacagtccatgtggacctgtccaatgagctgtggcacacaaagaaccagctgctggattccttccacagaaaataaacagacttagacgtgcaaaaggccggaaccatctccggcctttactaatttcccatcttatcccactcagctgccaatgttcccggaaggtatttccggctcccttaaatcccgccatccaccagaaggggaaggacattctggggaaggtcgtatatgaccatatcggctttctcatccaggggcctgggtatacggtggataattaccatcttcctgccctggaagtaccgtatgtagttgctgtatacctctgaccgcagactggttcccagcaccaggagcacgtcggccctggctatctcctctgtggtacggctcatgatgctgctgtccaccatctccccgtagagagaggttccgggacgtatcatggttttgcagttcttacaatggggaacatgtctggcatccctgatctcttccatggaatacagcctgccgcagtgggggcacctgtttttgtatatgcttccgtgaaggtaaatcacattccggcagcccacctgttccggcaaatcgaaaatattggtggtaacaatacactgaagcttgtcctcttcctccaacctggccagcgccctgacagacggagtcatgtcaggaatctttttcagtatctcctcgcggtaaaattcatagaaacgttccggccttctggacagacaggaaatgtgaaacagctcctccggtgattccgaatatttctgttcaatctcataagcccgtccttcctgtttaagtcccagaatacctccctcttccatcatcccggaaccgcagatggcaaccgtatagctgctttcagccaatacctgcttcaggagttccaatgttttttcgccaatcatacccgctcagtcctcctcttgttctgattgctccagagcatgtctgatacccgcatactctgacatcattatactgcaaatccccccgccttaccacaggaatccgcgggaactgtaagcgtcagccccgtaaatcacggcgttttatgtcgaaaaaagcagtacgcggctaaatcaggtcattaaagcagatggctccgtatgggcggatgctcattcggtaagcgcttccctctcctgtgcatttttcaatatagtgtatgaattcgtccaccagttcattgggcagcactgccatgataacgccggcaaagcctcctccgtggaccctgcaggcccccttctgcttttctgcaatgaacagctccgtaagcgccagggtaaccgtgattccctgctcctggtaatcgctgttggtaaagcagttctggagccatttccatgaggaattgccggatgccgttatattgtttaagaaatccttaaaacggttctccttaagggcaaggacctctgcctccacccttttattttcctcaaagaaatgcagtgcgcgcagcacggatcgatccccggcaaactgccgtacctctgccaggttgtctatcacctgttcctcggaaatctgggacaatacctcttttccaaaatacctggccacctttttcatctccgcgggaaccgaggaataatccgcgctcaggtcagcatggcccttgccggtctgtacgattatcaggctgtggtcctgggaaccaaagtcaaagtctatcttttccaccttaggtaccagcggctccataaaatcaatggtgataaggccgcccacagcacatgccatctggtccagcaggccggacgccttgtcccagtagttgttttccgcgaacttgccgatatgggcgtatgccacggtgctcatacggccttcattaaaaaatgtgttgagcatggagcacagcagcatctcaaaggaggctgatgagctgacccctgccgcgcttatgacattgctggtgatatacgcgttgaatccgcccacacggtagccggaatccttaaatccctggagaagcccctttaccaggtccacggttcccgcctttttctcactgggttccagatggttcagatcaatggtaaaatcctgattatatgtctcgctgacaatatgtacctgattggattcattcgttccggccgcccccacacagtccagattaatgctgcctgccagcaccttgccgtggttgtgatctgtatgattgccgctgatttccgttctgccgggtgaggaaaacagcttcacatccccttccccgccaaacatcttctcatacccggccagcaaatcctcatagcgctttacattggcctctaccccgtcttccccgtagagctgcgccataagagtcctggcggcgccgctctccagcagttttactgtctcgtttaccttcatgacttacctctcctatcttttctgaaacttctgaattcagtttatcacacatggcacaaaaacaacaatacaatattctcctgtctttatacgtttttttaaataaagatgacaccggacatgctttgctgttataatctcttaaaacagtatcatgtaagaaagcaggtatttacaatggaatggaacggaaaaccatatcactccctggactatgagctgaggcagcagttcggccggaaaatctataagctgtccctggacggaggcatgagctgtcccaaccgggacggcactctgggaacagggggctgtatcttttgcagccaaggcggctctggtgattttgccgcttccagacagacggctgtctcccggcagatcgagcaggccatggctcaggtaaagagaaagatgcctgacggctcacagggttcttatattgcctatttccagtcctacaccaatacgtacgctcccctgccctatctgaagcaattgtttggggaagcagtctcccatcctgccgtcgcagccctgtccatcggcaccaggccggactgtctggagcctgaggttatcggcctgttaaaggatttaaaccgtgtgaaaccggtatgggtggagctgggcctccagaccatccatgattccaccgccgcctttatccgccgtggttacggacttcctgtgtttgaggacgccctcagacgccttaaggcagctggcctgaccgtcattgtccatgtcatattgggcctgcccggcgagaccaggctcatgatggcggaaaccgtacattatctggcccaaagccccatagatggaatcaagctccagcttctccacattttaaaagggaccggcctggcagattactgccgcaccaatccctttcccatgttcacaatggaggaatacattgattttgtcatagactgtgtggaaatccttccccctgaactgaccattcaccgcctgacaggggacggtccaaaatcccttctcctggcccctctgtggagcggcaacaaacggctggtattaaacaccctgcaccgccgtttcaaggagaggaacacctggcagggaaaaaggtatgtcccggattcctcctactctgccgctctttcctccaccggcgccacaattccatcctccccaaccgtcacgccataggaaatggatgtgatatactggtagaaacccgccttttctccttcatcctccagcatcctggtatatcctccagaggatgtgcccggcaccagccgcagcagcgcgtcctccccgtcccattccacggtcagcagggctgttttcggaatgctgctgccgaacacaaaattacccaggctgtacacgatgggcttgcccttataatattccagcccctgcagtacatggggatggctgcctatcacaaggtcggctcccgcgtctatatactgctgtcccagggtcctctggtactcctggggccgctcgtcacgttcaattccccagtgcacatataccacaaggtaatcgcagacttccctggcctttttgatctcctccaacagcaaggacggatcataggtggtgagcatgcccggtcccttggaagtggcgttccaggaaccctccggtatgaccctggacgcgcccaggaacccgattctgcggccctttgcctccatgaataccggctttttggcttcctccagattggctccggctcccacccgcaggattccggcatcatccagggtgctgcatgtatccagcagggcatctgtaccgaaatccagagcgtgattgttggccagggtcacgatatctattcccagctcctgaaacatggatacatgttcaggcggcagccggaaggtaaactgcttatcagcagcagctgttccgcggctgctgaaggggaattcttcatttgccataaagatatcgctgccgtcaatcacctggcggaatccgctgtccaccactccgcctatattgcctgctttccggtatgcgcccagcacgtggtctgagagaaggatatcccctgcaaatacaagttttagcggagagtcctcatccgatgttcctgttccgggcccctgtgcttcagcattgtctgaatgggcggataaaccgccatccgctgcatccgggccctctgttccttgggcgccgtccattccttgcaggccgtctgttccttgggcgccgtccgaatctgcggcgccgcctgtttctgccccgtccccttcctccggttccggcgcctccacgccagccacgccagtgcctcccgagacacctaccatctcagccctgacatatttgtcctgtgctgagtgccatattaaatatcccgtaataccggccagcagcagccctaataataaggctgctgccacaatacatcctgttctcttcataaaacctctcctggcggacatcagactgccagtacaatccctccatcattggcatatacagtggccacgcctgccgcgttggtaaccacaatcttcttgaatcccaccctcttagccagctcatcctttacgtattcagcccgctcagggttattcacatggcagacaaccgcaatcttactggccgcgtccgccacttcctttaccgcaatatcgcacattctctgaagggccttgttcattcccctggcctggtccagcttgatgatggttcctgtatccgcgcccataacaggcttgatgttgagggctgtggcaaaaaaagcctgcaggcccgacagacgcccgttcttgcggagtgtatccaggctctccagcacaaagtaagtattcatgccgtccctgtatgccagggttttctccaccacctcatcaaattccagtccggaatcgcacaggttttggataaagagggcaatattcaactcccctgaggatgcggaaagcgagtcaataacagccaccttcttggcctgctccgccatacctttttccgccatctcctcctcatacagcttctttgccactgccgccgaattataacttccgctgaggtggctggacagagtgatgacaaatactgcttccgcttccgcctcctcaaatgcagccttaaaggtctccggtgacggacacgctgtctttgggcattccggacacgcctttaccatctctataaaccgtttctggtcaaatgtctcatcatccaccacctgggcactgcctacctgcagtgtcagcggaatcatctgaaatctgggatccttcttcatatcctctgttaaatcaagacaactatccccgataatcttataggtcataattatgtcctccggtttttcttatccatgtcttttcacatgtagtattcattactacttattataacagtatggatggtaaaatgcaatgcttatatgtttccagttttatggagattttttggactgattttttggaagaaggaccggatggggtgatagccccgttggtggaaacgggcggctggggatgattggacggctgcggggtaagaaggctttcgaccttcttaccccgcagatacccatgcctctcctgccccgcctgctcccattcataaggattaaatggggaggtaaaaaatacggctgatgctggtgtgattgttaatgttattgtctgtgtgaaatttcattccggttttttatatcattccggcttctcagcgggcctgctctatggctgataaaatctggtcaatggtggcttgacggtcgccggtgtattcgatggagatttccataagtttgccgtctatctggcggaagtaggtgtcctcatgctccgtggtgccgttgctgttctggccggaggtctttatatacttgtattcgtagccgcccatgtttacggtacctgtgctgtcaactgtgtaatcataatagcccgcataatcaatgagccattccaggtagcggtccagctgctgggtggaatcggtgtagtctatggtaagcaggtagccggttcctccgtcgtaccagtagtacatattctcaccagcctccaagggatagctgtaatagcttccatcgcccagcatcagttctgctgcctcagggaacttcataaacagattggcccagcggttgctgtaggtctttcccgatatggtgcctgtttcataggcctgagccgaccgctggcttccttctaccatgtagccctgggcgtcaaaggtatattggctgccgtctatggtcttggtcaggtttgtcaccatgtggccgaattcatccacatatttccaccttccgttttcttcaatccacgctttgtacatgatttggccgttgccgtccagacggtatgtaaggccgttctcgtccaaggcccattcattggtgccgaaggtaccgtccccgtggtgatattgccatccgcctgcatccgtatagctccagccgcctcctgcgtatggctgcatctggcttaaaagcagggctgcgtttcctgcctggtcaccggaatagatctggaccagcatgtaacagtttccgccaatctccctcatgtagacatccaggaacatacggttggacagttcttccatgtaggcgtcatattcctgcttttcctccggggtcatgtcataacttcccatccaggcagacatatactgcgccatcagggctccgtaattaatcttaacagagtaatagccagctcctgctatgccggccgtccccatggctacataggaaccataggatgcatcctggcccagcatctgaagcatctcctgcatgactccctccaggctctcgccttccaggtctgccactatgccggccatggcaagatagctttcattctcctcatcaatggcagcggcaatgaaatcaatcttcaccccgtcctcttccatataggacagataatctaatcccaggttacctccataccttcccacctcaaaacctgccggaaatgtggcctcaaatccagccatgctgcttctcaccgtactgcccgcgatggtgctgagccccgtgggaagcgcccaggcagtcatcgcgcctgccgcagtcagtactgcgctaagcagcactgccgtaaaacgtttacctctcatacaacccctctccttcctactataagatatttccagtataaccgatttagaatgcccgtgcaacgcaaataggaactggtttcaaaagttccctcttgcaaccagttcccatacttttgtaatggttcttgttataataccgtgtgttatgcaggattactctgttttttcagaatctgttttttcgccggccataatcatcatgatttcattgctgcggcttacaaatgctgtcatgcgctccggagccagagggccgtggcttaagcttgccaggtcatacagctgctcgcagatcttggatgtattggcatcttccttatgacccagtacatactgcacaagaggatggttggcattgagcaccagagtctctcccgtacccccgaacatgcccatatccataccgcccatgctgtacatcttcatcatatcctgcatacgtcttgtgtcctcggatatggtaatcatggaagccactcccgcattcttcatcttctcaaccttgatgtccagcttgtcattgttcagggcttttttgaagtattccgtcagctcctcggatgttttcttgaactcctcatcgtcttcctttacttcttccttgaacgccgcgttaaggtccgtatcaatgcgcaggaacttaaggccttccttcttctgctccacatgtgagataaacgggctgtctatggcagcaggcataatcaccgcgtcaatgccctcttccttaaacatgttgatgtactggctctgttccttttcattggtcacatagaaaatggtattctcatgcttttccttgttctcatccaggcagtcctgaagggtcaggtatttgccctccaggttcttgtacaggatgaaatctcccatcttttcggcaaacttctcatccttgatatatccgaacttgataaagggtgcaatgtcgtcccaatatttctcataattttccctgtctgtcttgcacatgcccgacagcttgtccgctaccttctttgtgatgtaatcggatatcttcttcacaaatccatcattttgcagagcgcttctggacacgttaagaggcagatccggacagtcgatgacaccctttaaaagcatcaggaactccgggatcacttcctttatattatctgcaatgaacacctggctgttgtacagcttgatggttccctccaggctgtcatactccatattgattttcgggaagtacaggatgccctttaaattaaatggataatccatgttcaggtgtatccagaacagcggctccttgtaatccctgaacaccttgcggtagaagctcttataatcttcctcgctgcactcattgggatgcttgttccacagaggattggtgtcgtttaaggccacagggcgcttgttgattttatatttttccctggaaggttcgatttccacggtttccttggtaccgtcttccttttccttctcctcggttctggcaggctcgattacggtctccaccacggtatccttgtcggtcagctcgtccttctcaatggtctcatactgtggctccgctgtctcattgtccagaaagatatccacaggcatgaatgcacagtacttctcaatcacttccctggccctgtactcgttgcagaactcggtgctgtcctcgttcagatataaggtgatggtggttcccacctcagccttatccccttcctccatctcaaagtcaatgccgccctctgattcccagtggactggtttggcatccttctggtaggacagggagtcaatggataccttgtcggaaaccataaacgcagaatagaagcccagtccgaaatgaccgataatctggtcctcattggctttgtccttgtacttctccatgaaatcctggacgccggaaaatgcaatctggttaatatacttgtcaatctcgtcctcggtcatgccaagtccattgtctgtgatctttatggtcttgtcatttggattcacggacacctggattttgtactccaaatcctccggtctctcgtactcgcccatgagctccagtttcttaagcttggtaatggcatcgctgccattgctaatcagctccctgtagaaaatgtcatggtcagagtacagccatttcttgattactgggaaaatgttctcgcttgtaattgataaactgcctttctttgccatcttttatccgcctctttcttatataataatagttcttcatgttttgcaatgtttactcacaaaatacattttagtacgagacgaataaaatgtcaataaaaaattagcactcatttttgttgagtgctaataatccagtctttgaatggaaggattcatggcggtccgaagctctttctcagctatcatgcttgataatattttccgggaattggtgtaagctgaatgggcatctgctttttcggccgcgcttccagcaaaaacggcacaatcccatcctccggtagacggtttcccggcaggatcgcctgcttgtcgaatttaaaggtgacgcaccatgcgtctgcgccgtcagccagagaagcccccagcggaaagcagaactcgctttgatcgtcccgcaggatgtggatgaactcctgacagtcggcgggtacggcgctgcttgctttcatctcactgattttctccgccgtgtccctcagccattccacatcgtaaatatgggggctgtccagggcaaatacaaaaaccgcaggaagatattctcctgtaccggggagccaaaggtcgctgttggcctgtaccaccgcaccgtagaccatgggggcgttggcatacttctcccgccacttctccctgccaaagaggggcgcctttccggccacatcccgaaaaaagctgctttccgcactgcggggtgtggagcggtaaggtgtcagcttattcaaatccgtagggacggcggcagctttccgccggtccgcaaatgcggccttgtccgcctcctcctgcgcggccatctccgtctgcctgcctcggacagaggacatatcatatccctttttctccatctcagcaatttcttcctcagtcatggcagcttcccagccgccggcctcttttaccgggtcaaatccaaacagtcccatgataattctccttttctatcattgattttacatcagtacccacagcaccgcgctgcacaggataatgacagctccgccgattccctgcaggatgcgataccctttttctccaaagttccgatagacaaaagcgcgaaagcccaatccatcttccccctgaggatcgcagacccatttccagcggaagatcgcccccagcaggaacaacgcccctgccataataagaaagagctgccagtttgcttccagaaacggcataatccattccataaatctagtgtataagccgctcatgtgtttctcctttccatccggcttatataaaatccatatgaaaatcagcctgataaacggttctgtaattcttatctttattatcctttcaaatcccactgcaccggtacctgaccagtcgatgtatgcatttaattacttttgttttcaattagtaattaagtgaattatacatgaaagccggaaaaaaagcaagacctgcgcatagaaaaacagcgcaccgcttaaatggtgcgctgtttgttgtcatttgtccgcatcggccagagaggccagataacgggatagggcggttgcctgggccttggccgtctgttccagctcctctggaaagaagaaagggagcgaccgggccgccgagttatagatcagtaccactgagaggatcaggttgcccagctctttgggactgcatttttcctggggaatctgccagagagccagtacctgttcataaaaccgcgcctgtccctgctggtaaacctcaaactctaccgggcttaaatgtttataaacccacatttcttcttcctgggtcatcacaaagaaatggtgctgacggctgtggaccaccatatccaaaaaatgatagatagtctcctccagactcatccccttatttcccgcagtgttccgtacttcccggagcaaaagtgaaatttcatagtcgatgatacggatgaccagctcggccagggaagtgtaataattgccgtaaaagaatggcttggagatgcctacagcctggagtatgtcctggagagtggttcccttcagccctcgctgggacagcatttccaggcccaccgtcagcaaatcccgccccacctgttccctctccaccttggtatagcccttctttgacatagcttcaccgcctttttgttgagataccaacagtttaccacagcagcggggaaatgtcatgcatccttggagaaatgcccggaaaagtctggaaaaaaccggaaaaatccagaaaaaccatgagaatacaaggcgtttccggggcgcggctcattgtctccaatggcggcgtaattcaccaaaggatgttactttttattcctgtaataagacgtaaaagtcagtgaaaacaccataggtacaacagcatatcctgcatttacctgtcctctgttatagagaacatgggcaactccggcaaaggttaagattataaatattatacttagtgccaaagctatttttttcattgccctctccttattgcgcactctctcttgcagtctcttccgaaaagaaaactgccttcgttaaattaccaaagatttcagcatcctttaattgatgaccattaccattaaagaaaacctccgtattgtttgcggatatttttatttcagtaccatcgtccaaaacataggtgattattataagcggttcatatgtatccgatgccgtggaaaaaggaacataatttaaaaaatttattagtttaacagccagctctttattttcttcatcaacaaactcttttttaactccggattctgtatctgtcattgtcacctctttgatatcttccatcctgggaggacgcataagaggccagccttttgtaaagacatataccattgaaacaactgttactgataacactacagtcactaaagttcttaaccatgtgacttttttcatctgtaacctccttaattctttcggttcttccataaatattctattaacccgatagagaacaggactgcaaaaaggagcacgccacccagcaatgaaattctatatggattaccggatatcaccccgtaaataatacaaatcaaatcaaagccaaccgtaattaccagtgcttttaaaaatgcaagttgtgcgtatcgtttcatagaattctcctcccatggtatgtgcagtttaatcttccatccattcgtattaccaaacatctatcgctcaattatatattgcaattttatcataaagaggcggacttatatatgtatctttccttaatttttacggaattaaaaagtatcttatatcataacaaaaattttattttccctcccttcctttctcccaaagatacaccatcacatgttcgcctttcgtgtcatattcgccgttaaagcagaaaccaatctgttcataaaggcggattgcccttgtattattttcatacacactgagatataccgtgctgtctgaatattcggcatggagtctgtcaagcaaggcaagcacggcctgcctcccatatccttttccctgatatctcttgtcaatcagcagccgatccagccataaccgtcccggaaaaggggaaggaaaatagccgtacatcgcaaagccaaccagtatatctccatcatagatacaaacaggccgccatagatttaagttgtccgcttcttgtaagcattcgcctacactttcgataaatccggactgttcagaaaagaccgacagattttcggcttccattcggttctcactatttaccggttcaaaatgtaattgattattatttttcagattcatattaattcacctttcgttttaatgtaatatatcctgatgggttttccatctgacggcagttttggggctgtaatacgtttcatataacagcgttcatatgttttcctcccaaaataaaaagagccgaacaaaacagtgaacccgccaactgccttttcgatgaaactgtacgcagaaacatcagcagcagacctgttcaacctattttactcagctcatgcaggtacgcctgcatcgctataataagtaactatatcaaaataaacttaaaatgtcaaagacaggatttatgcagcggccattatggatttctgcggccgccattacggacgcctatactgtgaacacattttccgcatcctatctggacacagcaggaaggggagtattggaagtatttaaacaacgacggcacatatttggcccatacatggcaatggattgatggaaattctgcccgttttgaggatacacaaggaacccggctgattggcttcagcattaacgattatagaaaccaagccgactatttcagaacggcagagggcacaacagatgccagttttcagggcggaaatgctgatgcggtccaaaccacattaaaagcaactgttgttttaagagataccaaagaataccgttctggccatggagccatgtccaattgactggttatgttggggactatcagaaacactggtcaaatgttcactgctttttccagtcaaatgattttgttttaactactgtaaggatttgcagtaccggagcggaaatggatgttgatggttttatgaacagcctggtgaaaaatcgttattatgattctgtccgataagatatcagtgttccttaaccggccctggcatggacgaataatgagtcaaaaacgctctccggattcttttgcacggagagcgtttttgattggttggttaagccctgttttaattaaccatcaggattcttccctctttttcttacttatggctgtcagaacaaggagcaggccagacaacagcatagtaaatgtggttccgccagtcccctgaccggttttcggcaatggtgccagaggaacttcatcttcatcaataacaacaggcgcatcaggaagaaaagccaatggcacttcctccggattaatggttatgccgggaccattaatatccggagtggcacggtgtccgcctgaattatctccgcccccgccgccgctgctgcctccgcctggagtctctggtgtgaaaccatggctgtatacattagtaaaaatcacgccttgttccagattacttccgccagcatatacggcaatcaatgtgttattcgattcatcaaaaattatttcatacatcccctgatatacggtattatcataagtcacctcattgacagtggtaccacctcccacttcagagatggaatacacaacctgtgttcctgtctcgtcagcggcaagcatgtctgccagtttaaacctggtgttttcaaacggctttatagtaatcctgtcaacttcaaaatcattctttttcaaggaaaaggtatattcatcatcctccgaaaaatcacgtccagtcaataccttttcaccattaaatacaacggttcctgatactggcgccggcttttccagctgaaaaccaaatgtgaaaccaaagtgattcacctgatatgcatcagttgtatagtcaccatccaaagccatgactatattattctccaatttatttgaagaaccggattgaatgttggaaaatgcacctgcaaagtacggttccattatagtggtgccataatcattacggcttcgcatatggcttccaagtgaataggttgatgcatccacactctctaaataataccggtccagcccatccctatcataactatctgtatttacaaataaccgcagacatgaattataaaaataattgtaagccacttcggctaattcataatccgttgtacgcgctccaacattctggccctgaaatcctatatcccaattaggcgtgggattaaatccaaaaatctcggctatcacataatccggaaactggtcaagctgttttacctgcaaatcatatttgtcattgtagaaatcaagataataccggaccaaatcctcaactccggtatagtcatggggtattccttttgaatctgtaaatttgaaattgtccagattccatttgttataggaaggaaccctgtctactgtgcagttgaacagagaggcaagagctgtatttcccatgttccacactacagttcctttaggaatgatctgaccggtatatgattcgaagccagaatcctcgccgtcattgagaattgtataaacaaaactattagctttgtattgataatcaagctgggacttattaatgatttttacattaaattgatatttatcacctgcctgtgtctcattccatatataatcatctatattggggataatctcttccatgatataatcttgaagattaatattcagttcatcggcgtccacattttccccaatggtaatttctatgactgcctcaaaatttttataattagaatttaatatttcatatgaaaattcgataccatctgatgtgggagcaagtataatcggatctgtcttccaactgctgtcttcccaggatttataggtagaatctgcagacgccgacataacagagaaagcacctacaggagagaagctgtccgtccccatctctaccattccctgagacgcatctacaaccgcgtcttttatctctatctcatattcctgcgcaccctctgtaaattcttttacatggaacgcgccgacctcactctcatttccaactatctccggaacctgtatggatacgttcacctcatcattgggctgtgtttcatttccagtgccatctattacagttacatcataaacagcaatccagtcaaccttttcacctgaagcagctagttcagagtttaacctttctacaaagccatcagtatcgctcataacttcggccttaacatccgcaatattttccatggctttttccgaaccagatactgctatcacagctccatcgtccgctacagtggagacaatgaccctctcagccatgatattcagcttactgagcgttgttctatatgcttttgctgtggcacagttaccaagaccaaccaaaccacttatgcctgtttttacagtgtcattttgtgtctctttttcagttccgttagatggtgttgctaccggctgtttttccggcacatctgtttcgactatagtttctggtacagtttcactgctttctggtatagtttcactgctttcactattcccgggtacagccgatgtttcctctgcggtatcatccgctgccgatgtaattacttcctgcgctgcttttgttgtttcatccaatttctcttctgatgtacgttctgtctcttcctggttgcccgtctccgttgctttttctgtacttttctctgttttatcaacagcttctgattctgtatctgtttcagactcctttaccatctctgccttcggcagttccgaaacatctccggtttcactgtcaccaactacaggagcgtaacggcggataatagatgccactggctcaccatctgctgcttccggttcaactgctgcctccgtctccggagcttctgtttctcttgtctctgcttctgttgcttcctgaattgcttcctgagttttttcctcagtagtttccaaatctgtggttgct

SEQ ID NO: 575 - DNA, 4490635 bp, Enterocloster bolteae (residues 1,496,880-2,993,758 of 4,490,635)
  source 1..4490635: mol_type = genomic DNA
tcaccggtaggagctgcttcagctgcttctgtagaagtctcagtctcaccctctgtcgaagccgtgcctgcctcttcagaagcagtcgtatgttcctctgccggtgcgcttgtctcactctcatccggaacaactgtggtagtgccatctgcggtttcttctttagatggtacggtggaatcaggagctgtcgtctcctctacaggcttagaaatgtaattaacttcctcatccccatatgccgcatcaaaattctttacagtaatccgtttggtctttttgaccttttcttctccattatcaaaccttatgatattggtggtgcagctaatggtatcttccccgttgttcacatataaaaaaataatctcttcagcacctgttaccatatacatatcatcagcatcttccggcactcgtatgaacactcttaactccacatccacacttccgccttccggttccgggaatacttccattaattttccctctccgaaaaacatgctttcgaattctgcaacctttccattggtaaaatcaaggtcactgacagtcacctgattctcactgacaatagactcccggactgcattcagcaacttggtaccatccatcgtaaatgcaacagtttctgccgagtctgccgcataaacagtatttattccggtacccgcatttgttagtaccataactgccgcaagcaggaacgctaaccaccgtttctgtaaatcatataatgtcctcattcttcccccaccccttttttgactgttcaccctgtcactcctctcattatctttatcacctgtatcatctgggataaatccgtaatcaactaaatttagtctaccaaatttgggttacaaccaggtaacaaaatgagatttaatgaaaatttgataatagcatcaatcaacatacataaaaagggtctaaccagagcagttacttccataatcataaaaaaagtgtaagaggtaaagcacgaatggtgcgttttatctcttacacttatatcccttttttacggaaggaaatccctgattttcttgcttttagaaggattacgaagctttctgagagccgctgtctcaatttgccgaatgcgctccctggtcacgttgaaccgtttccccacttcctccagggtcaggggatgcccggtctccaggccgaaacgcagaatgatgacctcacgctcccgtggattcagcccctgaagcatgctgtcaatctcctcccgcaaaagaaaactctctgccttatcctctgtggaggcattggcgtcatctgccacaaaatcccccagattggagccttcctcgtcacctaccggggtctccagggatacggtatctcccgatgcctgaatcagctccgccactcttttcccggacatgtttacttcctcagccacttcctccatagacggttcacgtcccagcttcacagacaggctgcgctgggcacggcggattttatttaccgcctccaccatgtggaccggaagccggatggtcctggactggtccgccagggacctggtaatggactgcttcacccaccatgtggcataggtgctgagccggtaacctttggcatagtcaaacttttccactgctttcataagccccagattcccctcctgaaccaggtccagaaaactcatacccctgccggtatatcgttttgcaatgctgaccaccaggcgcaggttagcctccaccagcttgcggcccgcttccacatcaccttctgacttgcgtcttgcaaggtctgattcctcctccggtgtaagcagtgcaatggaaccaatctcttttaagtattcacggattgggtctgctgtagacacgccttccagaagccgctcctggccatatccgtcgtattcctcctcttcctcatccccgccggaaaccatactgccgccatccagcatctcatccggatccaggcggtctcttccccatctgaattcctccttcgccagagacggctggtccagctcggcatcatcgtctaaaagaaagtccccctccggcaattcctcttccggttcctcgggagcctgtatgtggacacccttgcgctccagcttcagatagacatcctccatctcttccggcgtcatctgaacatcccggaaatggtccagcacctgggtcatctccagacgaccttcctgggcggccgcttcaccgaccagctgttccagtctcttagacaattccattttatccatatgttatcctcccccttctcctgggacatactaaatataggtactgtattgcgtaaatccctctttaaacagcggggcttacgcagcacagtaccgttactgggtctgcgggtacgttaggtacatactatctcatgggaacgcataaactttgctactgccttatcccactcattttccagggtcttgtccatggtaaaaaggtgcagcgaagttcccgtcacacaatataatgctccgtcttcgtaacggatattcagataaagtccctgtatctgctcactgcttatcccgcttccggaagtggaagcgaatttttccgtgtccgaaggaggaagcagcaggacgatatggaaactccccggcagcttttttccttttattagtgaaaaacatacggggcgaagcactttccaggaggaaaagaattcaatctggttctcctccagctcttcatctgtataatatccctgtctgatgtgtccgtcgatggaaaaattgttgtaggtgacaatgttcacttccttaaccaggaagctgtcaaaatcttccttcaggaacagtttggatgtaaatgtctttacatcctctactttcaatgcaatcataaccttctcctgccctgggttacaccacaggtttccaaattcttactcaattatacagtttttgactattgacgtcaaatagaaactgtggggatttttttactgagttctttatgggggtgcgggggtatgttctgatatgttctgatatactctgatattctctgatataatttgatatgatctgattgatttactttaacatatgtctgtttattttcatagtgtcataatatcgactatatgttatttgttacagcacctccacaacctcaaagcgttcaaacgtaataggtgtttgatcggtaaaagtataaccgcgcttggcagcgtcccgtgtccaatagcgtatattgcccgatttccattgttcaaagttttcgtcctcaccctcaagttttaccatatcccaagtcaggccgcaaaacctgacggtttcaacatgcactgtcttaatcacacaagccggagtgctccgaccgtcaagtaccagtgataaatcaccaacgcttggcgcctgctcatcctccaatataaccgaaactgttgccgttttctttccggcaagtaccagggctaaaagttcgtctgccatttcggggctatcgccaaaggaaaagcgttcaaaataacctctatctgtgtttttcattcctattctcctcttctgtaaatgtattttttcgttcgccttttcgttccccttttccgccaaaggcactgtttaccaataaaatgctcttaaatagttgggtagtctggagatcaatgatttcctgttattgtctgataaaatgctgagtctgtcttgtaaatgccctgatagggctgttcaatgtaataatcatttttttctaaatagacaaacagtgtgctttttgcatcttctgtgtttatatcaatttttatatactcatcagcttgtggtatatcctgtacggattctttcgctgttgcttgtgcattgttcatagacgatatacattggcttatccactcactgtcagaatatttttccgtttcttctccaaccgttacatcaattgactgtatggtgctttcctctggtaagctaatcggatttgcatttttttgtgaacaaccggctgcagaacaggccataataccagcaataagaaaacttaatatctttttcataaaaattcctccataaattctgtttgtcgagtgcgctttatcagcctactatgaatattcttgttccttccactctaatttttaatgttgaatctgtcaagtggattcatctgcttttgttatggctattgtgtccatgtgttgtctttatgattgtgtgcttgctttatgattttatgctttatgattttatgctttatgattctattttttatgatatcactctgtccgtcagctttggcggctcttggcggttccgtgagttcgcagtgctgccatcttgaatccgctgcgctccttcaagatggacggctggcgccgtatgcatagagacacggaaggccgggagggtaagcgagcttgccctcccggccttccgtgtctctatgcgcactgcttgtagctaggccaggtttgtataccccatcatatcacggtctacggctttggcggcttcacggccttcttgtatggcccataccaccagggactggcctctgtgcatgtcgccggctgtgaatatctggtctgcgctggtgcggtaggtgccgggttctgtggctgcatttgtcctggcgtccaggtctatgccgaaggcgtctgccacgtaggcctgggctcctgtgaagccggcggctatgagcaccagatcggcaggaatttcacgctcgctgccttccacagctgccatgatggtgcggcctgtttcctcgtcttttttgggaaccaggtttgtgattatggctttgcacaccttgccttccccgtcttttatgaattcctttacagtggtctggtactgccttgggtctgaaccgaatatgcttatggcttcctcctggccgtaatctgttttgaggattctgggccattccggccaggtgttgttctccgcccgctctgcgggaggcttgggcatcatctccagttgggtgactgagacgcagccgtgccggatggatgtgcctgcacagtcatttccagtgtctccgcctccgattaccagcacatgcttatcctttgccgatataaaacttccgtcctccagtccggaatccagcaggctctttgtggtggctttcagaaaatccaccgcaaagtatatgcctgcactgtccctgcccggcacgtcgatatcccttgggttggaggccccgcaggccaggatgatgcggtcaaattccttcctgattttgccggcccggtaattcctgcccacatccgctcccgtcacaaaggtgattccctccttcttcatcacatctaccttgcgctcaatcacccatttttccagcttcatattgggtatgccgtacatcagcaggccgcccacacggtcgttccgctcaaatactgtgacgctgtgcccccgtttgttcagctggtccgcagctgccagccccgcgggaccggatccgataaccgccaccttttttccggtgcggatggagggcggattagggagggcatatccgctgctgtatgctttttcaatgatagctctctcattttcttttatggtcactgcatctccgtacagactgcaggtgcaggccgcttcgcagggtgccggacataccctggaggtgaactccgggaagctgttggttttttttagccgattgtatgcctgtttccagttgccggtatacaccagatcattccattcaggcaccagattgtgcagggggcatccgctgaccatccctccaatcatcatgcctgactggcagaagggcacaccgcagtccatacacctggccccctggcgtctctgttcctcctcgcttaaggaagcgtgaaactcattccagtttttaatccgatcctcaggagttttcccccttcccacttctctctcatattccaagaatcctgttgatttacccatgtttgttctgcctccttaccctcttaaattggcgtaaaatgcctcaatctgcgcctgttcactgttcagtcccttttcctccatctgcacaatggcattcatcatgcgccggtaatcatggggaacaaccttcttgaacataggcaggtattcactgaaatgctccaggatccgcctgcctttcagagagttggtacaggccacatgttcttcaatcaggcctttcagttccagtacatcatatttgccggtcacttcctcgaaggataccagctccttattgaggcgcttgtaaaagctgcggtcctcgtccagcacataggcgatgccgccgctcatgccggccccgaagttcttgcccgtggctcccagcaccaccacgcagccgcctgtcatatattcacagccatggtctcccatgccctccaccacagcggtggcacctgaattccggacgcagaagcgctcccctgcgattccgtttatgaaagcctttccgctggtggctccatatagggccacattgccgattatgatattctcctcagcctgaaagagcacgcctttcggaggaaataccaccagcttgcctccggaaagtcccttgccgaaatagtcattggaatcccctgccagctccagggtcagtccccttgggataaatgcgccaaagctctgtcccccgcttccgctgcagctgacggtaaatgtatcgtcagaaagcccttccgggtatttcctggttatctcggagccgaatatggtccccagggcacggttcacattggtcacctccacctgaatgcgctttttctggccgtttccaagagcgctcttaaattttctcaaaaacacctgctcatccatggtatcctccagacggaaatcaaagacctgtttcccgctgtatccggccaccttctgaccttcataagggttatccagtatccttcttaaatccacctgattggcccggccaaggggaaggttctcacgcctctttagaaggtctgtacgccccaccagatcatccacagtgcgcacacccagccttgccatgtactcgcgcagctcctgcgctatgaacagcatgaagttcaccacatactccggtttgcccctgaaacgctttctcagctccgggttctgggtggcaatgcccataggacatgtatccaggttgcagacacgcatcatcacgcatcccagggtcactaacggcgccgtggcaaagccgaattcctccgcccccagcatacaggccattgccacatcccttccggtcataagctttccgtccgtctccagaatcaccttgtcgcgaagtccgttcataatcagggtctgatgggcctctgccacacccagctcccacggaagtcctgcgttgtaaatggaattcctgggggcggctcctgtccctccgtcataggctgagatcaggattacctgggccccggccttggccacgccggcggccacggttcccactccagcctcagataccagcttgacggatatcctggccctggtattggaattctttaaatcatatatgagctgggccagatcctcgatggaatagatgtcatgatggggcggaggcgatataaggcttactcccgtggtagagtgtctggtttttgccacccacggatagaccttgcctccgggcagctggccgccctcgcccggctttgctccctgggccatctttatctgaatctcctgggcgcttaccaggtatcggctggtaaccccaaaacgcccggaagccacctgtttgatggcggaacagcggttgttccctgccggcccgggaatcaggcggtccaggctctccccgccctctcctgtgttggatttgccgtgaatacggttcatcgctatggccaggcattcatgggcttcccgggagatggacccataggacatggcccctgtcttaaaacgcctgacaatggattccacagactccacctgttccagcgggatgcctccgtcctcaggaaacttaaaatccatcagggagcgcagatggtacatcttatcttctctgtccacctgggccgtatattgtttaaagatatcataattacccgacctggctgcatcctgaaggagatggatggtcagcggattataaaggtgatcctcctcaccggagcgggacttgtgattgcccgcgctttccagggtcaaatccacatccagccccagagggtcaaaggcagcggagtgaaggacgtccacatcccccgcaatgtcctttaatgtaataccccccacacggctcacagtgtccgtaaaatatttatccaccacatcctctgagatgccgatggcctcaaaaatctgggcgccctgataggactggatggtggaaatgcccatcttggaggcaatcttcacaatgccgtggagcacagccagatcatagtcgcagacagccgcgtaatagtccttgtccagcatgccggaatcaatcagggaacgaatggactcatgggccagataggggttgacggcacaggccccgtaccccagcagggcggcaaaatgatggacctcccttggctcgccgctttccagtatcagagccacgctggtgcgtttcttggtccttaccagatactgctgcagggctgatacagccagcagggaggggatgggtacgtggttctcatcaatatcccggtctgagagtatgatgatattggcaccgtccttgtgagccctgtccgcctccaggaacaggcggtcaatggccttttccagggaggtattcttatagtaggtaatgggaattacctccactttgaacccaggcttcttcatgttcttaattttaagtaaatccaactctgtcaggatgggattctccacttttaggattttgcagttttttgcggcctcctccagaatattgccctcctcgcctacgtagacggttgtggatgtcacgatttcctcacgtatggcgtcaatgggcggattggtcacctgggcaaaaagctgcttaaaatagttgaataagggctggtgcttcttggaaagcacagccagggggctgtccacacccatggcggacactgcctctgccccgttaagagccatggggagaatcatggtcttatactgctcatatgtgtaaccgtatgttttctgaagcctcagacgttcttcatccttcatggcgggtatgcatttgtttggcaccggcaggtcctttatgctccacaggttggaatccagccactccccgtatgggttgcgggacgcatagtagtgcttaagctcatcgtcatcaataagccttccctgctttgtatccaccagcagcatttttccggggcgcaggcggtcctttttcaccaccttagtctggtcaatgtctatggctcccacctcagaggccagtatcatatagccgtcctctgttatgtaataccgggagggacgaagcccgttccggtccagcacagcccccaccacgtcgccgtccgtaaacaggatggaagcaggtccgtcccatggctccatcatggtggcataataccggtagaaatccttgatttcgctgtccatgtacttgtcgttttcccagggcgcggggatggtgaccatgacggccaggggcaggtccatgccgctcataaccataaattccagggcattgtccagcatggcggaatcagagccttcctggtttataatgggcagcaccttgtgcatgtcgtatctgaaatactcggattccatgttctcctccctggccaccattttatccacattgccgcggatggtattgatttcaccgttgtggacaataaggcggtagggatgggcccgcatccagctgggattggtgttggtgctgaatctggaatgcacaatggcaatggctgacttataatcttcatcctggagatccgaaaaaaacagcctcagctcacccaccagaaacatacctttatagacaatggtcctgctgcttaaggataccacataggtgtcttcattgctctgctcaaaaacacggcgggcaatgtaaagctttctgtcaaaatccagtcctgccttcattccggcgggcttgcccacaaagccctgggcaatatagggcatcacgtccacggccttcctgccgagaatttcaggcgcagtgggtacctctctccatcccaggaaggtcataccctctttgcgcacaataatctcaaacatcttcatggcctggctgcggatcagttcatcctgggggaagaaaaacatacccacgccatacgctctctcgtctcctatctgaaagcccaggtgttcagtcaccttcttaaaaaatccgtgggaaatctggagcatgatacccacgccgtctcctgtcttgccctcagcgtcttttcctgccctgtgttccagattttcaacaatatgaagggcctggtccactgtgcggtggctccttaaaccctttatattggccactgcgccgatgccgcagttatcatgctcaaaacgtggttcatacagtcctggctgtttctgtttggattccataggtctttcttcctttctttgtaaaaatagggggggatttgataaactaatttcaaaacaaaaaaggcggcacctgtctctaggtaccgcctgcggtcattcttgtgaatttcatttaattatgttactgcaaaaggcagattacatctcgcctaatccgctctcaatggcctcggtcagggtcttcatagcctcttcctcgtcctcgccgtcacaaatcaggttaatctcagtgccgcacttaattccggctgccataacgttcagaacgctcttagcaacaatcttcttctccccacattcaattgtgatgtcgctcttgaacttcatagctgtctgtgaaagaactcctgctggtcttaagtgtaatccggatggatttacaaccgttaatgttttgctgatcataatacactctccttattcactattttgtactctggacactgccactgcccatgtcccttatgaaagattctattacatctgacttcctatgtcaagttaatcggaaaaatcctaagcaactttttcacaatcttgatgtcagaaaaaagctccggcatcattcctgaccacgcgtgttcattcgtacgaaggaactttgcagacgctgcacggcaggcgctttttgtctttcaattgcttctgcccgggaataaacacagccgcagtaatcctgacggtaaagtccgtacaacgcggataattccacggaacgcttatagccgtttttcttcttgaaatccgaaaccagataaggaattccatactgcccggccagtctgcatccgatatcattgagccactgggcattctttaaagggctgatggacagggtggttgtgaaataatcaaagtctcctgaaaccgctgccctggcggcgcggtcaagccgcagttcatagcagcggaagcaccgctccccaccctccggatccttctcatggcccctggcaactgaaaagaattcctccggttcatagctgcctgccaggaacctgaccggcctttccgtctccatttcccgtatcagccgttcctgctccttcaccctggcctcatactctgtctcaggaaaaatattgggattataataatacacggtcacatcaaaatattggctcagatattccagcacatagctgctgcagggagcacagcagctgtgcagcagcagcttagggacccgtccctcttcccgcagtccctctataagacggtccaattccttctgataattgcgcttctgtcctggctgtgtcattccttttttgtcctttcctgaaccctctgttatttttacctgccaaaaagagaggccgccccgtttacggcccctctttttaatgctcccaaattttctcaccataacagcaggcccaaacccctctgggcctatgcacggtaagtcttacaggaaatccctgattcgtttgcttctcaccggattgcgcagctttctcagagccttggcctcaatctgacggatgcgttccctggttacattgaattccttgcccacttcctccaatgtacggggatgaccgtcttccaggccgaaccgcagtacaatgacctggcgctccctctccttaaggtctcccaaaagagcgtcaatgtgttcccgcagcatcacggattccacattgccctccggagtcaccacattgttgtccgccacaaaatcacccagattggagtcgtcctcctcaccaatgggtgtttcaagggaagccggctccctggcaatctgcatgatttccatgaccttatcttccgtcatatcaagagcctctgccagctctgtcacagaaggctcatagcccagctccagcgtcagctttctctgcatcttggacatcttgttgatggtctctaccatatgcaccggtactcggattgtcctcgcctgatctgccaaagcccttgtaacggactggcggatccaccatgtagcatatgtacttagtttgtaaccctttgtatagtcaaacttttccacgcccttgatcagtcctaaattgccctcctgtaccaggtccaggaagctcatgcccctgcctgtatagcgctttgcaatgctgaccacaagacgcaggttggcctcgattaacctctcctttgcaaactcatcgccgtcagccttgcgctgggccaaatcaagctcttcgtctgccgtaagaaggggcacggtgccaatttctttgagatacatgcggaccgggtcctctgttccgattccctctaacagatccactgcatccaggtcgatttcttcctcttctgcatctttaatgaagctgtcgtcgtctaaatccaggtccaaatcaatctcatcaagcagaacagtgtcctcggtaagcatcgcttcgtccagtacgggaaccacgtcaatgttgcggccctccaggtaactgtaaatttggtccatctgttccggtgacagattatccccggtaaaaaaatcattaatctcccctgcatccaatgtgttgtgtttggtttttgcatgttcgaccagcttttccagcttctttaaaaaatcgtccttttccactgataaacgtcctttcgcttaaaggtaaatgtggaaactcccacaacttatcattatataccatcgaaaaccttatttcaacaattttcgacatttatttttattctatctgtttccgccctgatccctcttccggatgatttctcaacagaatctgcacgttctccctgatatttccaatggtgacctcggtcctggatccgccatactcgccgtccagcacccagtccacctcctgttccgaagtaaggcgtatggaggatgtcttgaacttatacacatactcgttgggttcttccctgagaaacatgtaggatatgatattgctcaaatccaccggtgtcctgggcatccgtatgagcagcacctcaaagagaccgtcattgagggccacagactggttcaccagccccttaaacccgcctacactgatggtattggtcaccatgccaaaggcaaaatcctcctccagcacctgtccgtcccactccaccttcatatgatagggcttcagtcctgccaggctctttacgccttccagcatgtaggcctggtgtcccagaagattcttcctgtcctgggatgtcagataggacacctctgtaaaagccccaaaggctgctatatacataaaattcatgtcctcgcaaaaggttccggtgtcaatggcaaagggggttccctccacaatatcccaggcagccagaggcatgcgctttggtattcccaggctggtggcaaagtcattggtggatccggcaggaatatagcctagaagcggcattttcttaagcttcatcattccggatatggtttcattgagtgtgccgtctccgccgctgcacaccaccacatccacctttttgcccagcctggccaccacttccatggcatccttctgcttttgggtaacgtggacacgaagctcatatccggccttggtgaaaatatccagtatttccatcagctgtcccttgatctgttccttaccggaacggggattgaatacaaacaacatttttttcatcctgcattcctccctttcagtgtaaccatttttgtcaatcttatccaatgagctttgtatatgcgttaaatgcattgggcaaagcgtatgtgtgctccagttcctccctggataccatgaaacaggataagggatcctcctcctgtgagagaaccaccctgtacccggtcatatgccactccacatgtgaaaacacatgctttgcctccggcagcagctccaccgacgccacctgctccctgtcaagtcccagcacctgcggcaccgtctccccggaagtctttccctcaatgttgggaagctcgtaaagggaggccagcagtcccttgggagggcgcttgcgtatggccaccttatcctgatattctatgataaaaacggtccgctcctcgatcttcctcgccttggccggagatttgtacggaatctccttccaccagccgttctttcttgtaaggcagatggaggccagaggacactggctgcatctgggttcgccgccgggtatgcacaccagggccccgatttctatgagaccctggttgtaatggctggcctcatcctgcggcatcacggctttaagctctgcctcgatgccagccttcaccgaggctttctttatatcctcccggtcccccaggagcctggaaatgacgcggagcacattgccgtccacggccggcagcggaatgccgtaggcaatggatgcaatggcccccgctgtatagcttccgattcccggcagccgtatcagttcatcaaaggatgcaggaaggcagccgccgtattctgacataatcatctgggccgctgcctttaaatttctggcccggttataatatcccaggccttcccacatcttcatgagatgatcgtcttctgcctgtgccagatgggacacagtgggaaacgcttccatgaagcgctcaaaatagggcttgaccgcctctaccctggtctgctggagcatgatttccgatatccatacccggtatggcttcggatcatccctccatggaagggagcgggccctggatgaataccaggccagcagggggcgttccacagcactgagacgttccctgcgtccaagaggcatctcctccctctccagtacctggaggcggtcatacaaatgtcctgtatcatacatatccatatatacctcttaccgatacctcccctgaaatgacggctgatatgtttccgtcctcccgtctgaccagaaggctgccttcattgtcaatgcccagggcctttcctttgtactggcctctggggtccagcaccaggacctctctgttcaggttgacaagggctttattgtagtcatccctgagccccgacatatcacatgtcttcatgaagatatcataataatattcaaaactgtccgccactgcggcaatgactaagctgcgcttaatgctcctgtctgcctccagcttaagggaggtggctgttgccctgatttcctccggaaagtcatctatatttacattgattccaataccgggtatcacatatcggatgcattccacttccgtactcatctccgtgaggattccgcatatctttttgccattcagaaccgcatcgttgggccatttaatcatggcctcaagtcccgtgctctccttcacgcccctgaccactgacagccccgcgataagggtcagcatggatgcgctcatgggagacatggccggcctgagcaccatgctcatccagatacctgtaccggccggggagacccagcttttccccctccgcccttttccggctgtctggcggtctgcaaccaccagtgtgccgtggggcgctccctcttctgccagtttcctggctcttatattggtggaatccgtctcatcaaaatattccagcctggtcccaatccactgcgtgtgcagcatggatgcaagctcagcctgggttatgacgtcagcaccttccacaagccggtatcctctgttccggaccgcctctattacatatccttcttccctcagttcacctacagccttccagacagcagtgcgggaaactcccagcatcccgcacagctgctgtccggacaggtaatccccggtgcttttgagcatccgcaaaatctctgtcttcatatgccgctcctctatgcccagatactgatggcgcttacgatgccaaggaccataagacctgccgccaaagccagctgcaggatgctggcaccgaactttttcttatcccttcctctggtcttaagctcaaatattccgtttaccgcatttaacaatgctgccagcaaaaacaccagagggaaaagcatatgatttccctccgggttaatgaatgacagcacagacaggattacaatggcaatcccaagtatcaggtgcaccatgtccaggaataccccggaatggcgttcgctccgtcctctctgtccctgcatatattatgattctcctaacgttgcaagcataactgctttgatggtatgcatccggttctcagcctcgtcaaacacaaccgactggcctgactcgaatacttcgtctgttacctccagctcggacacattaaaacgttctcccatctccttgccaatcttggtcttaaggtcatggaaagagggcaggcagtgcaggaaaatggcattaggtccggccaggtccatgacagcctttgtcaccttatatggagtcagctcctcaattctctcctcccatacctcgtcaggctcacccatggatacccacacatccgtatcaatgatatccgctcccttaaccgcttccgccacatgctctgtgagagtaacggaaccgccgctggccgccgcataggcctcgcattccttgaccagagatgggtccgggaaatacttagccggagcacaggccacgaaatgcatgcccatctttgtgcaggcaatcatcagggagttacccatattataacgcgcatctcccatatacacaagctttaagcctttcaaacatcccaaatgctcccgtatggtgagaagatccgccaacatctgggtggggtggtcctcattggtcaggccgttccagacaggcacaccggcgtactttgccagttcctccacgatttcctgtccgaaaccacggtattcgatgccctcatacattcttcccaaaactcttgctgtatccgcaatgctttccttctttccaatctgtgacccagacgggtccagataagtggtccccatacccaggtcatgggctgccacctcaaaggcgcaccgcgttctggtactggttttctcaaagataagggccacattctttccgcgcagcgaatctaccagaaccccctgtttctttttatccttcaggtccgctgccaaatccagcagatatgtaatctcctccggtgtataatccttcagtgtcaaaaaatgtcttccttttaagtccatagcgtcctccctgttatgccgcccatgtcctgccatggccccggcttgattttctgcaataaataaccatgcatttctattcaaaaacgcatagttatttatatttatgcatctttatgcataatatactacacctgagtgctgctgtcaagtatgggaatcatggcttttaatgcagcggcaccagcttttttatgaatcaggcgcagcagttcctccactgtataaattttaaaatggcttatacggtattgttttgccaaatcctccagtatggacaggtacagctccttatagtcccatccctccttcagtttcagttcctttgccagccggggaaatacctgttctgtataaacacggtatcccggagagaggtccttctgttcctcccgcccgtgctttgcctctcctgcctcctgcagctccggttccatgtaagaaaggaggctctgtatctccgatatcattttatcaaaatagtaaggctcgccttccggcgcatcaatataataggcacgtcccgccaggccataaagcatacgttttccgtcgaaataccccagcagcatgtttcttctcgcccggcgtctgtcaaactccagaaggccgcccaaatccctcctcggcgccacatggtacagggttgctccttccggcacctccagcttcttttccgtgtctacaccgtaaccatatatccgcagaacaatcacgtccctgtaacctctgtccagaagcacatccaccggcacattattaattccgccgccgtccatataatacttgccgcccagccgctcctgacggaagcccagcagataggcgctggccataagcaggtccgctattcctccctcaggagcctccttcacatcggcaataaggggatgccggtcagaaatggagtaggttaccacatagagctccctgtcagaatttcgtatcttttcctcgtccactacatcctcaatcaaagccctgaggggagcaatatcaaagccgccgtccctcagaacccgtatggccccggctatgagttcccccacattaaggggcgccagactggaaatattcttaaggctgaattttgtcagacgttccataagttcatcatccacatccatgaccctggagtaactgatattctcccagatgcgctctgccttttcaaaatcatccatgcaaataagggcaccgttcaaggcgcccaccgaagtacccgcggcgccctttatcctgatgcccgcttccctgagggcgcgccaggcgcctatctgataagcgccttttgcccctccgccctccaggacaattccatattccttactcaaatccagctgcagcttaatgatgtccacctgccctttcccgtctgcccagaataaatgccaaaggacgaataagaataagcgtgaggaatgatacggccacgaacactgccagctgcgcctccatgggcagccctgccagagctgccgcaaatccgcctatggcccctgcggcaaaccacagggaagtcaggcatccgaaagccagctccactcccagaaaaatcaaaaatgatacaagccatccaactgataacatatgcaccttctccttcctgcgggcagatatggccaaaagtcctttccttatgctgtctccgccgggacgctgcagcttcttctctgtctggctgtctcaaacataagaacggaagcagcaattgcagcgttcagggattccacctttccctccatgggaatcttcaccaggcagtctgccagcgaggtggtttcctccgtaagaccattggcctcatttccaattaaaaagcccacattgtcagtataatcttcctggtcataattattcatacctttcagatgggctgcaaaaagacgcactcccctgtttttcatgagcaggcaggcatcctgcaggtcatctgcatacacaaagggcatcctgaatatggatcccatcgtggatcgtatcacttttggattatatatatctgccgtatcatgattcataacaatgccggtgataccagcgccctctcctgccctgattatggtaccaaggtttccggggtcctgtatcgtctccagtaccatgatggccagagacctgccgtctggtgctggttttacaatgtcatccatggtatagcgcttctgcctcaccacggccagcactccctggggcgtctgcgtatctgccataacattcatgaccacatcgctgactgtctccggccggaaccgccccatccatttcctgttatccgcgtcccctgcaaagttctccgtaacatacagggcatccacatcctctgggttcagctccctgcacattctgaggccttccaccacatacatgccctcttcccgccgggcctttgctttgcttctcaggctcacaacacgctttacctgcttgtttgatgtactgttaatcatccgtattcattctcctgacactgcttatttgatgccttccagttcctccagccacaccctgcccgatgcgtcgctgggcatcctcaaatcccctctgggggaaaccgccacagaacccaccttaggcccgtccggaaggcaggaacgcttaaactgctggctgaagaaacgtctgtagaacacgttcagccatttaaggatcgtctccctgtcatactgagacttaaacgcctggattgccagacggtaaatcttggacggggcatatccgtatctgagtatatagtaaagataaaagtcatgaagctcataaggccccaccaaatcctctgttttctgtgaaatctggccgtcctccgggggcagaagttcagggctcacaggtgtatccagcacatcaaggagcacatccgccagctccttttcattgcatgtatccgcatagtagcggaccagatgacggaccagggtcttgggaaccgacccattgacaccatacatggacatgtggtcgccgttataggtagcccatcccagggcaagctccgacatgtctccggtcccgattaccaggcctcccacctcattggcgatatccatgagaacctgggttctttctctggcctggctgttctcataggtcacatcatgtttgtccatatcatggccgatatcttcaaaatggcgtgtcaccgcctccctgatattaatttcgcggagttttgcccccacctttccggccagggtgcaggcattattataagtcctgtctgtggtcccgaagcagggcatggttatgcaatgtatgccggacctggggatcctgaggctgtcaaaagccctcacagttaccagcagagccagcgtggagtcaagccctcccgacagtcctatcactgcttcatggcatcccgtgtgctccagacgcttcttaagacccatggcctgaatggatagtatctcctcacaccgcctgtttctctgtctctcatccctgggcacaaagggagccgggtccacgtaccggagcacatcaccgcccggctgcgtggaaccatgggtctgggtatcctgactccctgcgctgtcctccgaaaccgcatcaaagctgaactccacggtcagatacccgccttcctccctggctgctgccgggtccgggaatgtgctcatgcgcctgcgctcactgtccaggcgttccaaatccatatcagcacatatgctctcgttgataaaccgtctggactccaccagacaggtcccgttttcagctataatattctggccgccaaacaccaaatcctgggtggattccccctcccccgcattggcatagacatacccgcacaccagcctggctgactggctgcatatcagatcatggcggtacatgtccttgcctgtggtctcatcgctggcagagcagtttaccaccaccgtggccccggccagggcatgtctgatgctgggcgggcatggcacccacacgtcctcgcatatttcagctgccaccgtaagttccggcatggtattgcacctgaataaaaggttggtgcccatggggaccttctctccgttccagcaggtcatcaccggccgttcattgcccgggcaaaaattcctggcctcataaaactccgaataattgggcaggttccgcttgggcactacgcctataagcctgcccttttggatggctgccgctgcattgtagagcttcccgtcccgctcccagggaagccccaaaaacaccaggatgtcctttccgtccgtaaaccggacaatacggcccagctcttccttcgcccttctcagcagggccttctgaccaaacaggtccgcacatgtatacgcggtaaggcaaagctccggaaacaccataagcttcactcccctgctgtatccctgaccaatcaagtccataatctgctgtgcgttatattgtgggtcagccaccctgacctttggcgtggcagctgctacccttaaaaatccatctttcatgtctggcctccattgaaaataattgttttgatttaatataccacagattgacagaaaaatatagggaggaattgggccggataggtacatgaaccggggaagagtttggggaaaactccccatttacatcccctcaattctattatacaatcataaaaacaaataaaatacaggagttgtttctatgatgataaatgaattttccagaactgagatgctcataggcactgaggggatgaataagcttaagaactccacagtggctgtattcggagtcggaggggttgggtcccatgcagtggaggccctggccaggtgcggggtgggccgcctgattcttgtggacaatgatacggtttccctcaccaacattaaccggcagagtattgcgctccacagtaccatggggcagtttaagacccgggtcatgaaggacaaaattgctgacatctgtcccggcacacaggttattacctttgaggaatttgtgcttcccgataatatagaaagcctttttgaacgtatgaagcaccagatgggacagggcagctctgtggattatatcctggatgccatagataccgtgacagccaaacttgccctggcaggctttgccgcctcccacgctgtccctgtgatcgcttccatgggtaccggcaacaagcttcacccggaactctttcgtatatccgatatctcccagacctctgtatgccccctctgcaaggtaatgcgcagggaactaaaagccaggaacatcagggaactaaaggtctgctggtcgccggaacagcctcttacccccggacagacagcggaggataccgggtgccgccgcgccactcccggaagcatttcttttgtaccgcctgtggccggacttgttattgcaggagaaatcataagggatatctgcgggctggcttagccgcagatatccctcttcgttttataatgattcataccggccctattccaggggcgcccggtaaaacctgcctacaaactgctgtgtcctcagcacattgataatgatatgttcatctgcttcctgcatgatgtggatggcgttgtttacctcataggctgatatgactgtatttaaaaggtacattttctttttgctgtaccctcccatagcttccacacaggacattccatggcggaaatggctgatataggcgtccaccacctgctgccccttcatggtggttgcctgaagggtaaccagctcatagcggtggtggaaggcggaaatcatgcgtgtggagatgaactggaagataatggagtatcccgcgtgcttccagccgaaaatggcaccgtaaaagcagtacataacagcatttccaaaaaacacataggaccagatggagtgcccggtgcggttggatacaaacagggctataaagtccgtgcctccggtggacgcgtttcccctgagagcaatgacgattgcacttccaaagatgacgccgccaaaaataacattcagcacctcatctgtaaagatggggctgaagttgaatatctgcagaaaaatactgcttaagaatacctggaccagggaaaatatggtaaaacggaagctgattcccttgcagcacaggactgccaccggaatattcagcataatcatggtgacctgcatgggaatattaagcccgttcaattcccccagccgttccacaagcatggccatgcctgtaaatccaccggatatgataccggccggccgcacaaaaacctgcagtgcataggactggatgagagcggatacaaacaccgcagccactgtgataccggttcttacccgcctgtctttcttccattgattgataaaagctgagattctcagaatctgtcccataggaaaattcgctcctgtttcatttagttatcatatcacataattatccttcatgcttttttgccactgtaccaaatcctccagcgtatatttatccaccactccgctgatggcctcatccagctcgcgccacagacgcagggtcacacagtccatctgcctggtacaggggtttttatctccgcttaagcagtccaccggagccaggcttccctctgtgattctcaaaatggaacccaccgtatagtccgatgacggtctggccagataataacccccctgatttcccctgatgctgcgcacaaatccggctctggataagatagagataatctgctccagatatttaccggatatcccctgccggttggctatgtcttttattttaacgggctcgccgtctccgtggatggctaaatccaccatagtgcggagagcataacggccttttgtcgatactagcatgtatgttcacgtcctttgtcttaaattttatcctgccatgagtatatcatactattcctgtaggaaatatgtcaatagtaagttatcttccctgccaggtctgcctaaatgctttatgaatagagtgcactattttcgggaaaataatatggaaactgagaaaaattgcaggtccgattccataaggccggcctgctgacgattgagaacggaggattttcatgaagaatgaaccggtattcctgactgacaaaaaccacaatatagtgttggaggccctttcaccggctcccaatgcagctctccctgattcctgcaaaccctttgaaatcctggacccagcagccactgagggcgcagcggaaaaacatcttccggtagtggaacaggacggactccatgtaacagtcaaggttggaaacattttccatcccatgggtcaggaacatagcatcggatgggtgtgccttgtgacaaaagccggctgtgtcatgcgtgttcccctaacccctgactgcgaaccagtggcatccttcaccctggaagaaggggacgctcctgctgctgcttacgcttactgtaatcttcacggactgtggaaaaaatcaatctgattccttccggcaaaacactcctcaaacagccccggatgacagtttttatacccgctgccattaccggggcagaatgccggaagcatccggacaaaaaaatgagagccgcccttcccccacagaaggcagctctcagtcacgagcaaaaaccgtcacactattagtttatctggcatccccataccaaacaaaaacccgtaaggcactcctttgtgcttcttacatggacactataccaccgctcccatgatttgtcaatcatttttgtgcatattagtgaattcctttcccctatatacaagtttttatataaatttctcccatccgtccgcagaccaaagacaaatgtcttctgtatatttatctttcatcggtacatactaacttaagccataatttttatctgaagtcacacagaaaggaagaaaccatggaattttcccaaaatttaaaagacaacattacttaccttcacaagaagctgaatgtagagacgaattttgacgtggtttaccgcgtagtccacatcggcggccgggaagcatgtctttatttcatagatggttttacaaaggatgaatccctgttgaaaattctgcaggtgttctccaccatcaaaccggaggatatgccaaaggacgcccacggcttctccaaacagtatgttccatacggcgagatcggactgctttccaatgaccaggatatgaccgtccagctgctgtccggtgtatcctgcctctttattgacggttatgataaatgtattacgattgactgccgcacctatccttcccgcggtgtcagcgaaccggaaaaggataaagtcatgcggggctccagagatggctttgtggaaaccctgatttttaatacggccctgattcggcggagaatccgcgatcccaggcttaccgtggaaataacatctgccggagagagctcccacactgacattgccatctgttatatggaaaacagggttgataagcagctcctggataaaatcaagaaacggattcagaatctgaaggtagatgcgctgaccatgaatcaggaaagcctggcagagtgtctctttccctataaatggttcaatccattcccgaaatttaaattttcagaacggccggacacagctgccgcttcaattttggaaggaaatatcatcatcctggtagacaactctccttctgccatgatacttccctcctctgtctttgatatcattgaggaggcagatgattactactttcctcctattacaggcacttacctccgtctgtccaggatgaccatatccctgctgtccctgcttctaacccctacatggcttctgttcatgcagaatacggagctcataccggactggctggcatttatccggctttcggacccgcttaatgtgcctttaatctggcagcttctcatactggaatttgccattgacggcctgcggctggcggctgtcaatacccccaatatgctgaccacccccctcagtgtgattgccggtattgttctgggcgaatatgcagtaaaatcaggttggttcaacagtgagaccatgctctacatggcctttgttaccattgccaattattcccaggccagctttgaattaggatatgccatgaaattcatgcgtatcatcatattaatactgacatccatcctgaatatatggggatttgtcatcggaatcatcctgtccgcctgtgccatcatattcaacagaaccattgccggaaagagctatatttatcctctgattccatttagcctctcagaattaaaaaagcgttttctcaggggacggctgcctcatacagagaaataattgacctatcccatggtaaagcagaatagagaaacagtgaaccggccttttggccggttctgtttcctaactcatattgttatacatatcaaaataggcctccgcctctttttctgtcaatgaaaaatgtttctccagcttggccagtatgacttttttgtctttcccctcttccaggttatcttttataagggctttaatgccctgtgacaagccctgcgacaagccctgctccaatccctgcgacaagccctgttccaatccctgcgacaagccctgttccagcccattcttctgcgcatcttctgcaagccgcttataatagctttgcatggtagcttcgtcactggctgccttaaggcgctccaggtacagataacgcagttctttgtcggcattcaggcgttccagttcctccaccgcttccttcatataacggtttctctttgccatatctttaagcacctcccagtcacgggcggatataagctttgcccagtgatatatctctgtttgtttttcctcctcactgcaggaaaccagttgacttaagtatagcacacgcaggctgattttgccactatagacacacccggttttatcatccataagccgtatgaccgaataaaaatgctctgttcctttccgtggaaatcccaggatgctgatatgtatacactcctccaacgcatcataattctggcctttcaaaaagtcttctgtatacatacggctgatataaaagaggctccgttcttcccagaaaggatgtgacaaaagctgtatttctatattcactttcttacagtggttcaggcgcacctttacatccagtattccttcccggtcatcagcatattccccgtggagaaatgtgtccgggaattccagactggtgatctcacctgccggaatgtccagcagactgcttaaaagccctgtcagcgcagtcttgttgcggaatgttttcttaaaggcgaagtcattggtcaggcttatatccaggggccttccgctgtctgccagctgttttagctgcaaatccacttttttctttccttccctaaaaaaacgtctgatacgccctttgtgccattttcccataggcattgtcctccatgaactatttgatttatgtgatatgagcggaaatcccggcagatacgccagtacccggcaaaaacattggattttatgccggaaaagatttttatatagattgttcagaaacaatctgattggtccagtataacatataaaggtactgctttcaatatctcccctgcttttaaacggagtaaatacgctttatatccatgcaaaaagcagcgccggatcccttacctttgccaaaggagagatatccggcgctgccaatcttctgttttaaatcatagccattacagcttatccgcatttctgaacagggtatggccgtttgcgttcttcaccagaccggtcacatcaggcttagccaggacgatggcattcagataatacagcggtataatgggcatctcatccatcaggatggcctccgcctccttgaatatctccatacgcttgctgttgtccgccaggttccggcattcttctatcatgctgtcatacttcatggcattgtccccgctccagcggttctggttataggcgcgggcctgggtaaagcagttcaggtttgtgtccggatccagatagtcaccggtccatccgtcaaagcaaacatcaaagtttccggccttctgctcatcccagtacaccttggactcaaaggtaacaatgtctgcctggactccaagattatccttccacatggactggattacctgggcaatgtccttattctcttttgtgttggtaacaataaaggtcagaacaggcagtccctctccattgggatatcccgcgtctgccaggagtttctttgcagcttccacatcctcttgaatcaaatcacctgatacggtgcggaaatcctcggaggagccttcatatggtatcccataaggcacgaatccgtaggccggctcaggctttgacggaacgatggactcgcagattgtcctgcggtcaatagccatggccagggcccttctcacatccggattggacagatactctttggaacagttgaaatcgtaatatctggttccaatcttgtcatatcctttcagttcttctgtattcccatactggtcaatggcctgggaagttaccaggttatcgcccatagcgtcaatctcacctgcattatatgcggacagggctgactccggagactggataatcacgatttccactccgtccagtttgacggaatcagcgtcatagtaattgggatttttcttcagcacatagctgctctggggatttatcttctccagggtaaatgcaccgttgcacacataggtatccgcggatttggtccagggatcctgtccctccaccacctcctgcttgacagggaaaaagttgctggacgctgtcagataaaggaaatatggcgtaggtgctttcagggttacctccagggttttgtcatccacagcctttacccccacatcctgggcagagccgccctgtgtgttgtattcttccccgcccttcagatagtgcagttcccaagcagccggggaagccgtatcaggattcaggacgcgcttccaggaatattcaaagtctcctgccgtcagatcacttccatcggaccatttaagtccgtccttcaatgtgaaggtgtaggtcagcccgtcttcgcttacctcatatgtgtcacacatggcattgctcaggcttccgtctgcctccagctggaacaggccgcagaacatattctgcaggaaggtggacgatgtgctgtagttattcagtgtagggtccagtgtttccggttcctccatcactgcataggtaaggatcttttctccctcttttgacccggcggtcccagctgccgaagcttctgtaccggcatctgtaccggcaggactgctttgtgcctggccgcaaccggccagggtagtggctgtcagggctgcacacagcaataggcttaattttttcttcataacatttcctcctagtttttaacggattcccgtttggcagaatccaatacaggaaattatacctgcattctccgtggaaagtcaatacatggaaagcagtttggctgggccggccacgtcaccggccacctccctgccacctccctgccacctccctgtggccgggcgcctctcctactccagctccagcccgcctgtatacagctggtaatacattcccctctcccttatcaggctctcgtggtctccccgctcagcaatacgtccatggtccagtaccatgatagcgtcggaattgcggatggtggaaagcctgtgggctatgacgaatacggttctgcccttcatcagctcatccatgcctctctgcaccatagcctctgtcctggtatcaatgctggaagtggcttcatccagaatcaggaccggaggatctgcaatggctgcccgcgcaatggctaaaagctggcgctggccctgggacagctcctcgccgtctcctgtaagcatggtatcgtatccttccggcagcatctctataaactggtcggcattggccagcttcgccgcatcgcagatctccctgtccgtggcatccagctttccatatcgtatattctctctgattgtaccggtaaacaggtgggtatcctggagcacgatgccaagagagcggcgcaggtcgtctttctttatatggcggatatcaataccatcatatgtgatagagcccttctgtatgtcgtaaaaacggttaatcagattggttatggtggtctttcccgcccctgtggctcccacaaaagccagcttctgccccggcttcgcatacaagctgatgtcatggagcactgcatgccccggctcgtatccaaagtccatatcctgaaaccgcacatcaccggtaagtcttgtgtatgcggccgtgccgtcctcacagggacatttccaggcccacaggctggtccgttccggtacctctgtcatttttccgctttcatccatacggacattgacaagggtcacatctccccggtctgtctccggttcctcatccatcatattaaaaatacgttctgcccctgccagggccatgataatggaattggactgctgggatatctgggcaaagggctggttaaagctctttgtaaactggagataagaagcaatctggcccagggtcagccctgccaggccgcttagtgacagaattcctcctgcgatagctgtgagcacaaactgcaggttgcctatgttggtaatgaccggcataataacattggcgtacttgttggcgtggaatgcgctgtcatagagccggtcattcagcttgtcgaattcctccctggtctcctcctcatggttaaataccttgatgaccttctgtccgcttaaacgctcctcaatgtatcccgtcacctttccgatagccagctgctgcgccacgaaatatcgtccgcaccggcctgccagagtcctgctgacaaagagcatgagaactatcatggctgctgccaggacagagaggggaacgctgatacctatcatcaccgcggatatggctatgatggtgacaaaggaggacaataccatgggcagagcctggttaatcatctgtctcagggtgtcgatatcattggtataacggctcataagctctccatggggatgacggtcaaaataccgtacaggcagcgtctgcatatgctcaaacatctcatccctgatacgcttctggacgccctggccaatatttatcatcagacggttataagtgtaggtacaaataaccccaaccacataaaaggccgccagccctgccataacctggttcagaaccgtaaaatcaggatgctgctgccccaggagaggggtgataaaatcatctatgagcaccatcaaaaacagcggtcccgccacattggccaaagcgcttatgacaatggtcaccagcacacagacaaactggagcctgtaagtgcctgccacataccccataaggcgttttgccgttttggcataatggtggttcacggctgcatttttcttatttcccatcatgatcatctccccctttcttctgggattcaaatacttccctgtaaatcttattcctggcaaacagctcctggggcgtaccaaagtcatccacagcgccgtggttcagcacgatcaccttatctgcatcctccaccgaggatatcctctgtgctatgattattttggtggtgtcaggaatctcctcccggaacgccctgcgaatcatggcgtctgttttcgtatccactgcgctggtagaatcatccagaatcaatatcttaggcttcttgagcagggccctggcaatacagagcctctgcttctgtcccccggatacattggttcctccctggtcgatataggtttcatactggtcgggaaactgccggataaactcgtctgcctgggccagacagcaggcccgctcgatttccccgtccgtggcattttcattgccccaccgcaggttttcacggatggtgccgctgaacaggatatttttctgcagaaccactgccacctgatttctcagggacttaagcccatactccttcacatcccgtccgcccactttaagacagcccccggtcacatcgtacagccttggtatcagctgcacaagagtggttttggaacttcccgtccctcccagtatgcctatggtctctccggattttatgtggatatccacgtccttaagagccagcttctccttatctcctatgtagctgaaggacacatgctcaaagtcaatgctgccgtccgccacctcctgtaccgggtcatccgggtctgacaggctgctcttttcatccagcacctccacaatacgctctgccgaagaacgggccatgatgaccatcacaaacaccatggagagcatcatcaggctggacaatatctggaccgcatagataatcatgctggtaagctcacctgttgtcattctgcttcccacaatgagtctggctcccagccctgataccagcaggatgcagttatacatgcagaactgcatcagcgggctgttccaggctacaatcttttccgcatacttaaactggtaaaagacctcctgggatatgtgccggaacttttcgatttcatacggctccctcacataggcttttaccacccggatggcgttcagattttcctgaaccacgcggtttaacacgtcatagcgcttgaatacagcctcaaaatagggatgggcctttatcacaatgtaaaagagccccgctgccaggattggcagcacgataaaaaagatggtggaaagctccctgctgattcccatagccataatcagcgcaaaacagagcatgatggggcctctgatagcaatgcggattaccatttggtacgcattctgcacattggtgatgtccgtggtcagacgcgtcaccagactggaaggagaaaagcggtcaatattggaaaaagaaaactcctgtatgtggtggaacatatcctttctcaaattccgtgccatacctgccgaggccctggccgcattcgtccctgccaggataccgaataccagagccatcatggacataactaaaagcacggctccaatcttcagaatgtagctgatacttcccccgctcatccccttatcaatcatcagcgccatgacgccgggcaccagaacttccataagcacctccagcaccacaaaaaccgggcagagaagagatggatttttatactcccggactgagccaagcaaagcccggactgtcttttgatgttgtcctttcactgttaaaacctcctttttttgtaaattcccttggattttggggcaatttaaagagcctaagacggcgctgcctggtggcagccataggcccttccccattacttaagattcttcatcattttcatcccgattcggatgaatgtatccagttcttcctttggaatatcccgtgttatgaactgttccatttccaggatatccttaagcacccgaccttccagctcccatcccttttcagtgggaatgatttttttacacctggcgtcataggacgcctcctccctgtaaatcaggccctttcgctccatcagcttcagaatctccgtggccgtggggcggcgcaggttaaattcctcctctatatccttctgaaacaggtcctgctccctgcagcggccgagaataaagtgcaggattccgttctgggcaggtgtcagccctcccacaccctcagcgctgtcaatcttgcgccggatcaggttggaaagggtggcgataaggcggacggtaggattaacagccatggaatttactccttttattatatgcagaaaaacagtttctgttagtcacctaacaattctaaggcaacctatccggtctgtcaaccaaattcacacaattgtaacggctccggcgccaggcaggaccggtccggtaaggttcaggagggtttctccaggatttgataaaatccgcatttacaacctggattttcctgctataattggtaggggtgtcttatcccaattcatactctgagaggttatcatgaaacacaattcacatcaatttcattgcggactaaaagacggcatacccatcggtctgggatacctggccgtgtcctttacatttggaatcatggcaaggggagccggcctcaccaccttacagtccgttgtcatgtcctttacaaatctgaccagcgcgggacagtttgcagcactgggaatcatacaggccggggccccctttatggaaatggcagtggcccagctcatcatcaacctgcgctactgtctcatgtcctgttccctgtcccagaagctgggcgcagacatgcccttcttccaccgtttctttatgtcctatggagttacagacgagatattcggcgtttccgtatgccggcccggcttcttaagtcccttttacagctatgggctcatctgtgtcgccgtacccggctggaccctcggcaccctgttgggagctgtttccggggaactgcttccggcacgccttttaagcgccctgaacgtggcactgtacggaatgttcctggccgtggtgattccgccggccaagacaagcaggattctcaccggcgtcatcctggcctccatggccttaagccttgtgtttgcccatgtccccctgctggcaggtctatcatccggctttaaaatcatcctgctaaccatcctgattgccggtgccgcagccattctgttccctgtaaaggaggaaaatgaacatgaatcataatgtgtacctgtatattcttgtgatggcaggcgtgacctacctgatccgtcttcttccgctgaccttgattaagaaggagataaagaacgtatatgtcaagtcttttctctattacgtcccctacgtcaccctgtccgtcatgacctttcctgccattctccacgccacagcctctgtgtggtccggcgcagcagccctggcagtggctgttcttctggcctggaagggaaagagcctgttccaggtgtccctggccgcatgtgccatggtatttctgctggaactgtttctgtaaataaaaccatttcacatcccaggactcctacagcgacaatccgcctcttgcccttgcccgcctgtccatgatggaatggatgacaggaaccatgaatatggccacgattccgcctgcataaccgttattatacaggttcatgcccccatacacgattcccacattgagggcaacggaggaatgcaggtagcctgccacgattccggccaccacgccgaattcccctgccaccggcgcaagggtggtggagaataaaagggccagcatgggggatggctgataaatgttccatgtcttggtaaagctggccagatatacccccatcatcaccggagctatgttcctcagatgttttcccgtggccccaaagcccacaatggtgaagattccgcagatggtaggtccgttcagttcacctcccactgccagtacaaaataggtggcaaacagtccattgactcccatgttgaacacagtgctggcaccgccttcatctctcagataatctgttccgccgattccataggatttgataattcttctgtaagattcccagatgcttctgccccgcaccgcaaccccgaatacaatcattccgccaaacagtgcggacagcacgattccaaagatctcattgtttcccgtggaccatatgagcctggattctatctccactccaagggattttaacactgacacaatgaccgtcgctatgatgcctgcggcaaaccccacattgtacaaagaatatcctttgtgtgcaaaatgcacatgagtggaaagaggcggcagcacaaagcctataatcagccccacggccagggctatggccatccgcatcaccaccggcaggttgcccacctgcatcatctgggtgatgatgggcgaaaggctggtgccgtaaaagccaatataaatataccttcgcatggacgtcttgtgatacctggcgtacaggtacactccggccaaaatagcccagatgttaagcaggtttttgccaaacagcgaaaaaccgaacatcagacagctggaagtgatggtgtggccgtccatgtccatacccatgaagtagatgataccaatactcataagagtcagtgcaccggcgttgatgagggccgcccccacaccgcccacaacaaaataatccgtaatcagaaaatccggctcttttatcaaacgcacgattcccggaccgatttcctggattggctgcagaaacagcccaatgaccataaaataaacaggaagcagcgacagcagaaaaaacttctgcttcctggtcagggatttcagttcatgaaaatgttccagatgtttcataaatacctcccaatcaacattctttttctatcataactgatagacccccggttggcaaagacattttttacttctattggaaaatttattattataggttaggtcaggcatatcccggcatatttactgttcaggcacagaaggcagccgaaacattcttccttcaactgcccccaaaacaaaaaaaacgcccggtcacccgggcatcccacatctcatttttcctattttccaaatatcacaaaacggttatcccttaacatcttcacaaacttggccagccgttcatacagcggctcggcctggtctccgaattcttccctgaccagcgctccaatggcaatgatatttctgtttccatccatctgcttccagacaaagcttccgaaccggtccagctttacatggctcaccctgggcgtgacccacagcttctgggccagcttatcaaagattcccttgtgcaccatatccacggtcacgattccctgctggtcctctttccatgagaactcagggtttctgaccggtaccttttccagataattctggtcttttttcttattgaagcccaatgtaatccttccttccatctcctgctgttcataaacatgcacagggcgccaggattcctgacaccccatgcacacagaacccgcactgttataccagtatggttatttcctgttctctttatgccagatggtaaatttacacatggtaagcatcagtaacccaaagacaataagtgatacaatctttgccgccggacttaccagaaaagcgcctaagccgttatccagggcagacagattgataaaatcgcccagatacccgccccgcgcgcttgcaagggggatgatggcaaatacagccagcaggattccgaccagaccttctcccgcaatcatgcccgatgtatagagcacgccccggtcaatggcctctttcttatcctcctcctttgcatatttacgcttttcataccagtggcggatgagtcctcccaccatgatggctgccgtggtcctcagaggcaggtataaacctactgctaccggcattaccggtatcccaaggatctcaatgacaacggcaatggctgctcctgccagaatcatgttccatggaaggttgccgtccatgacgccctctaccacagtcttcataatcatggcctgaggagccggaagttccgccgagccatagccccaggcctggttcagaaggtaaagtacgccgccgatggcaatggcagaagaaaccacgccaatcagctctcccatctgctggttccttggagtggagccaaccagataacctgtttttaaatcctgggaggtatccccggcaatagctgcaataacgcagataacaccgccgatggagataacgcccatcatgctctcatgggtggtgccggacacggctttaagcaccagcgccgataccagaagtgtggcaatggccatgccggataccgggttattggaggatccgaccaatcccaccagacgtgaggacacggccgcaaacaggaaaccgaacactgcaatcagcatggcgcccacaaaatttacaggaacagccggcaccagccatatgattaccacggcaatgaggacgcctatgagtaccacattcataggaatatccctgtccgtgcgcagagtggaagcctggcgtccgccctttaagtcccgcatggcatccctgaaggtatttacaatcatgggaagggacttaatcaggcttatgatgcctgccgctgccacggcgccggcgccgatgtaacggatataagagccccacatagcctggctgctcatctcgctgatcagcacatcagccggtgcaaagggcgctgtgagtccgcttccgaacagcttgataatgggcatcagaatcagccatgatataatgcctcccgaaaacatgtaggaggaaatctttggaccgcagatgtagcccactcccgcaagggcaggaagcacggaaatacccacgcctccgccgtatttttggatatcataatccacatcgctggggaacagcttcaggccgtcagccacaaacttgtacaaagcggcaattcccatgcccgcaaatacaacgcctgccttggaaccgccctgctctcccgcaatcagtacctcggcacacgcctggccttccggatagggaagcaccccgtgctccttcacaatcagcgcctggcgcagaggaatcataaacagcacgcccagcacgcctccgcacagcgcaatcagcgcaatctcaaccagggaaggcgcgccctctccccactcactcatccacataaacagggcaggcagggtaaagatggctcctgctgccacagattcaccggcagaaccaatggtctgcaccatgttgttttccagaatagaatcccttctgaggattacccggataacgcccatggagataactgccgcaggtatggatgcggacacggtcataccgacgcgaaggcccagataagcattggcagcaccaaagagaacagccagaaggatacccaggatcacagaaaccgcggttacttccggaaccaccttgtccgccggtataaatggtttaaaaccattttcatctttcatgtatctatcgctcctttcgtattgaccacataaaaaccggatatttgggctcttacgtgagatacaagccaaccctgccgagacaggacggcttgtatcttatccccgtaattatagcatccttcagaaaaattttccacaatttttgtgtaaatggtaagaattgcattaatttttttaatttttccatcatttttatttaataaaacggccacataaccttacaaaacaaagtgttttctctgttttgtggcctgtggccggaaaaaatttccgaaatccattatttttcacaatcaaacacaagtccccaggaagcccttatatcatccataagtctaagaatgtccagtgtgtcctctttcttaagtacatcactggaggacatacccagccggacgcacctgtttacttcccgtatctgatactcaaagccatttacctcaaaaggaaaatccatgacatattcctccccctccatgggacggataatcagccgttctgccttctggtaatccggcagataaatggagcccccggatccgaacacggctgcttcccttggcatatccatgccaatggaggcggtagccgccgccctgaaaccgcccggatatcggagcagaaccgtgctgtaatcatcggtgccgaattcattcagatgatactccgatgtaacatgttccggctgtttatctcccataaccatgcgcagaaatcccaggttatagatgcccacatccagaagagcgcctccgcccagcccggaatcaaacttgcgcgccttccttgccccttcagccacaaagccgaaatcacacctggcaaatcccacctggccgataactcccccgtttatcagctcctgcatctttttcagggccggaagatggcggatccagaaggcttccatgatgaacaggcctctttcctctgccgcggcgaaaagacgttccccttcctttacattggtggtaaagggcttctcacataacacatgctttcccgcttcaagacatgccatacagttctcataatgcatgttgttgggagtcgccacatagaccgcgtccacctcctcgtctctgagaagctcctcataagaaccgtatgtcctgggaattccgtatttctttccgtaagtctccgccttctcccgggaacgggaaccgcaggccgccaatcggtcctcccccttcataccgtttactgtttcagcgaactttgccgctatggtgccggttgccaagattgcccaattcataaaagatgcctccaactgttttatttactcaaaattttcaatcaaatatacccgcaggcgagtccgatacaatacttaacgcttcatcttatgctttttcctgtacatgtaagtgtctgccctggccagcgtgctttccaggctcacatccttacccgggtcaaagaaggcatagcctgccgcaatgcccgccggaaatacattcccgtcgctgtaagccttcacagccctctccatggccagaattccacgggtcacctgctcctgtcccaaaccgtctaactggaccacaaactcatcccctccaatgcggaacaggggcgcccccggaaacgcttcccgtataatgtcagcggacctgcggatgtattcgtcccccttgtcatggccgaagcggtcattgacccccttgaggtcattgagatcgcacatcaggaaaccgcttcccggtatctcctgcggatggctgttcttgtgctgcagcatgtgttcatatgccagcctgtttccaacacccgtaagtccgtccctgtcacgttccaccttaagcgcctttgtttcaaggatttcatccgtcacatcctccaccacacagcggatgggatgtactgctgttttgcatgttattttaatccaccgggttccttccgcggtatccatctttatcacaccgggacctccgtcccggtgtgaggcaaggctctttaggaaacgtatgaattcatccttatcccgggaaaacagatgctcctgctcctttgtaagccttaaaagcctgggtatctggctggtcataagcaccttggaggaacgccctgatatctcaaaggctcccacaggaagttccgacaattctataagcttggcatgcctggcaaaccactggctggtaaacacagctatgataagaccggctgccagggaaagaaccagggaatactccagtatctgaccgattctgcgcggaaactgcaagagcaccggctcctccataagtccgattaggtaccactcatccccttcgaacggggtattgtggtaatacatccccatctggttcacacaggcgttaatttttcggccgctcctgtccgtgttcagcagggtatatatggaactttccttgtccttaagctccatctcaaacttgcggtcctgcccggccagctgtccctgaagggcgccgtaagtaaccgctgtctctttcttctcccgctccgaccggtatccgatgacataaccgtaggagtcccctgtctgaagttcagaggcaggaaggaaccggtacagatagctcacggatatctccacgccaaagacagccagcaccctgccgtcctggccgaacagtggcacggaataggtaatcacatcctcatctccctcgtttacctgaaaagggggactccagtatcccagccatttagagcgcccgttttccgctgccgcgctccagggcttttggaaaaaatcgcggttttcttcattgacctccaaccggaagttccagttagccgtggtggaaattttcatcttttcggctacattccatgggccgatgagcatatacagattttcattctggctgctgttgcggtccggattattattcctgaaatacagggcggccagggaaccgtccgtctccccctcgtccggcagtatcaggaacacgccggtggtctttgtgtcgtacagggcatccaggacctcaggcgccagcgcctccagcatgcggtccggctgtccctgatattccagcccgtccggactgtcaaaataccggcttatggtatccgtatgatggctgaaattagtccagacattcttcatctggttctccagattattcctgcggccctttaccttttccgcaaatatgcggtactggttggcctctgcctgttccatcactccccctgccaccataaaggacaccagaagcacgctttgcagtaccaatgataccacaaatgctatggtcagcttaaatgctatggatttacttctgaattttctgtccatctgtcttaccagccatttcttttaggagtgtttcataccaacggtcaaaatgctcctcgtccagcagttctctttccaccgactccctgctctcacctttttccatcctctgcttcagagtttccaaatccacattcacacagttctccagggatgaagaaaatatctggtccatatcataagatcccagaaaggtctcccggacatatacattgtggtttttcagggcattaagggaggtccggatgctctgctccactgcctggacattgtcccggctttccacatgggacaccagatctgatacggattccagagccttctcctgcacaggcagatatcccgtggccactgcaaagcgtatattctgctccggctgtgtgaaccatttaaggaaccggaccgcggcctgctggtggctctcatctgaggcaaacaccgccatgttggcccctctctgtcccatataaggcgtaccatcctgaaaaacaggataggcatagctttggcaggaaatgggatgggactgtctttcatcctcaatcaccaactgcggaaagaagcctgcgcctgccgaggagccgatataggccatcagccttccgcttttaatgccgtcctggttgtaggttctgctctcgtaccagccctttatatggggtacatagtatgcgtcccatacccttctggccgtgtccctggaataattgaattcaggcccatcctgcgtccagcggataccctctcccagctgggcggccgacagtgcggcaaaatcattaaatgcgttcatacccaggaacggactgcccccggaccattcataatacatgcccgccgcctgagccagaccctcccaggtcttaagcatctccttgtccgcgcctgtttcccctgcaaatgtctcccaatccgtttcattgagatagagaatctccgtggattttgccaccggaatcatccggtgaatgccgtctccttcccagactccctccttcaggaattcggaccggtaagcgtccagttcttcctcggtaaaatagtcatccagatgaaccagaggcacgatcccatccagcctgtacgcgctgtccgggtaggatgaaaatatatccggcagcgggtctgagcctataacatggctggcggatgcgtacagcacatcatccagctcattgctggagccgtatcccaccggttccactataattccctgctccatacccacagtctcgttaaattccatcaccaggtcgtcaaaggcgcccttggccaccgcgttataggaatgccagagcactaccaccacgggtttttcattttcttccttttttccatctccggccatacagccgccaagccccaaagcagcggccatgacagccgccagcataaatacatataatctgcgattcataatgaattacctccccgtgcagtccccccatggcaggcacagatgccgccattctccaaacacgttacatcttaagtataacacgcggcacggcctgctgtctattctggatgtatgataacagaacctgagccgcccctggttccgggtatatcgggattcccagctctttaacctttgaatccagggtctttaccagcacaggaccggaggctgatgttttattttattatggaatttctgaatatgcaagaaaaatatggcgagaatatccgcagaaaagattggtctgagtcagaaagaaaatggagaaggcgagcggtatgaaacagaatccgccgaaagaaaaagacaggacccccatggccctgccctgttctttttatgcctctctgcctgaatgtgagtaaaatgtaatcagatacaggccacacaatcccaccagcgcatagattatcctggttacccatgaggctgttccgaaaatccatgaaaccaggttgaaattaaagaatcctaccagcccccagttcactgccccaatcagggcgattgtaagagcggtataatccaatgccttattacccatcgcatgctacctccttgtcatgagcattttgcgcctgttttccaggcacttatgcagcttactatacgctggtagtatgtaccggtttgtggaattccatacattttttgctgtttttcatgattgatgtttcaatcagatgacggcgcttctgccggtcagtcctgcttgtcctccgcggcagcctctttcatctgccggattacctcttccggaagtatatcatacaggcggttccgtttaagaccgggctgttccagatattcttccctcagcataccgttaacccggtccaactcctcctttagttccctggctgagataagacggcatccctggcccaggatgatgacctgctccactccgtcggaggtggccacggacacatcgaacctgcgggcattttcatgggcgaacttctcgatatactggtccgctgtctcagcctcctttgtgtagaccacctggatattgtggtattcagaaacctctgtggcatgtcccgccacccggtaggcgtcaaaaacaaccatgagacagcacttgcgtatggcctgatagttgcagagcagatccataagcctgcctctggctccgtccatattgtcctgtgccagctccctcagctcctcccaggcaaaaataatattatagccgtccaccagaagatattcctgtctggcctcctgcttctggtaggtacgggtcaccgggccgctgtaggctgcagcactcctgcttcccctgctcttgcctggatatcctttgcgcgctgacttatcccggctgttggcataaaaggtgcgctccagtatcgcgtcaatttcatccgtacccagccatacctctgaggattcttcctgtccggcagaggattgccccggatgcctgccggaaaaaggattcctctcaccctccatctcctccccatcaggggattctattacaagaccgctgtccacatgcatgtattccttcacctggtcccagcttaccacaaatccggccccatgggcgcagaacacggatcccgtgggattttccgtatctctctccgggtcatagccggtctgcccgataatttcccggctgttatgacagggctcgtatcctttcagcgcacatgccagccttccctgtcccctggtataggacataacctctgcctgatacccccgcatggcggcgaccggagcctgtcccgtgaggacggcctgtccctgcctgttttcctcgataacgcaggtcccgcaccgcttttcaatatcggtcatggcgcgcccaatggacgcctccggcacttccaggcggaaggtataccacggttccaaaagaatgcaggaggcctccataagcccctggcgcagggcccggtaggtagcctgcctgaaatctccgccctccgtgtgcttgttatgagccctgcccgccacaagggtgatcttcatatctgttatggctgccccggtcagaaccccccggtgtaccttctcttccaggtgggtcagcaccaggcgctgccagttcctgtccaggtcatcctcgctgcatcttgtctcaaactggagtccgcttccccgctctcccggttccataagaagatggacctccgcataatggcgaaggggctcaaaatgacccacaccctccacggcgccagcgattgtctctttatacacgatgtttcctgtgccaaattcaacctgtatgccgaaacgctcttcaatcaggctctttaacacctcaatctgcacttctcccatcagctgcatggatatctctttcagttcctcattccatactacccgcagcaggggatcttcctcctccagctggcggaactttggcagcatcacagccccgtcgcagccctccggcagttttacctggtaattgagcaccggctccagcaccggaaccatggaatcctgcccggctcccagtccctgcccaggataggtcctggtaaggccggaaacagcgcagatggttccggcctcagcctcagccactgtctcataccggtccccggaatatacgcggatctggtttaccttttcctgccatgtctcggatggcttttcggtatttccgccggatataattccctttaccttaaggcttccgcctgtaatctttaagtgggtcaggcggtttccctggtcatccctggaaatcttgtacacctttgcctcgaattcctgcggatattccggcgccagggcccatttacggattccacctaacagctcctccaccccggtaagtttaagggcagagccaaaaaaacatggaaaaagccggcgttccttaatcagacggcgtatctcatcatcatccacatcccctgtctccaaatatcgctccagcagcttctcgtcacacatggcagcgtgttccgtgaattcttctgtccccgcaccgacaaaatccgcacatccgtcgtccagacgcttctgcagctccctcattcgctgttcccggtccgtaccgggctggtccattttattgacaaaaaggaaaacaggtatcctgtattttgccagcagacgccataaggttatggtatggctttgtactccgtccgcgccgcttatgaccagcaccgcataatccagcacctggagcgttctttccatttccgcggaaaaatccacatggcccggcgtatctaacagcgtcatgggcattccctcccacgtcagagctgcctgctttgagaaaatagtgatgcccctggctctctcaagggcataggtatctaaaaatgcatccctgttgtccactcttcccatcttgcgtatgcttcctgccagatacagaagcgcctccgataatgtagtttttccggcatccacatgggccagaataccaagtactattgatttcatatcctgtctctcttcctgctgtcttatgtctcttaacatggccgtacatccaccgtattgtcgttaagggtggtggctgctcctatatcggacagccgttcatggtgaagagcattgaccaaaagcccgtcctttgtaaatctcctgtcgtaaacgccctcggccgcagccgttccttccgccaccagagacgtaattttcgcggtaaactccacctctgccagctcattgaaggctgtaacgagactgccgtccgcgatttttcttgccgccgcatctcttggatggagcatcagcgccatagggccccggcctgactttaaatcctccctgtccataaagactgaattcagcgtatatgcgctgggcaccgccaccagccgcagggggtatgttcccccgtggcatttaacataccggggcatggactcctccatgttttcattataaatcatcattttaccggaaggcgtcctgaatcttccatggtctgcaaaggctgtggatacaactcccccctcccttaatatacgccattcctcttctgagatacaggatagcccctccatgggatgggccagaagctcctcaaacatctcttcctctgtcttcttaaaatatgcctcctcatatcccatggcctgagccagcaggcagaaggtgttccaattgctcttactctgtccggccggctcgatgattttcctggctgtcccaaaggtacagtatccatacgctgtatacacatcagtctgttccacggaaaaggcggcgggcagaaggatgtccgcatacatggccgtatctgtcatgaaccgctcatggaccaccgtaaataaatctgggcgcaatagtccctccatgattcccttctgacagcagacagaggccaccggattgcctccgtagacatagaagctgcgtatgggcttttctcccctgctccctgtaagggcggaggcaatctcattgatgttcaccctgcgtcccggtttcttcctgaaatccggcctggtgaccagccggttgtccacatagggaccagcccccggattacagccgcacaagccgccgccagggcgtccccatgcgcctgtataagcggacagaatggtgataagccgtgtggtcattccaccgttgccatagcgggagggaccgcttcccagaatgatggccggagccgcagctgaggcgtattcctttgccaggtccgcaattacctctgcgggtatgcctgtctccttttctgcccaggcaggggtgtatggggaaagagtctttctgaacgcctcatatccttctgtctgatgggcgaggaaatccctgtccgccaggttttcttcctccatcacatgcatcatggccaatgccagggcgccgtccgtgcccggacgaatcagaatggtctggtcgcagtatacatccatatctgccgcgcaggattctatgagcaccacccgttttccttgactgcgcgcccggatcagtgccggcatggactgaagcctggtggccttcatattgcttccccacaccaggtaaaagctgctgtccgaaagctccctaggatccagacagcctgtctgccccatgaccgcctcatagcctgctccctttgcggaagaacacagtgtcctgaccatgtcacaggcacccatccggttgaaaaaggcatccccgcatttgcgctgcaggacgctcatgacccctgagtaatacatgggcaggatagcatcagacccgtcttcttccagaatacggttccacctgcctgcaatctcctttaccgccgcatcccaggttatgggttcaaattttccctctcccttggcgcccacccgcttcatgggtgtaagaatccgctcagatgaatggatggactgctcatagcgctgcatcttcctgcatatcagcccctttgcagccggatggtccgggtcgcctttcacactcaaaatccgggttccgtctgtttctgccaaaagtccgcaggatgtgggacagtcgtagggacagattgtttttcttatatatgatgccatcttttgtcactccctctattaccgcgcccggggcatcatccggcctggcagattgcggtctggtatggaccggcacaatccgccggatcctgcatggtccgggcctattactgcctgaattccgggcgctgttatctgatattaagtatagccagcaatcgcttttccgtcaaactaattttccttcccctccaggcctgtgctgccttcgggactcacctgtaccgaacagtgtttgacctgcgggaatcttgcttcgatggtatcgtggacttcctttgcaattgtgaatgcctgctccagcataaggcttttgtctgcttcaatctccaggtcaacatatatcctggaaccgaaaagccttgttttcatggagcccacacgttccactccccgtgtatctaacgccgcctgctctatggatctgacggtctcctcgtcacacgccttatccaccatcttatccatggaatccctgaacacatccagggctgcctttactatgaatatacagatgacgaagctggccaacgggtccatgaccggcactcccattctggcgcccagaataccgataaaagcgcccactgaggacagcgcgtcgctgcggtgatgccatgcgtccgccatcagtgcacctgattttaatttcctggccgcagccctggtataccagaacatccattccttcaccacaatggatataaccgcggcccccaaagcaagcattccaggaacactcctgctcccttccgttcccgaaccaatggtttccaccgcgctcaccccaatggcgattcctgtggcaaacagtacggctgacagtaacagagccgccacgcattccatccgctcatggccatagggatgttccttatctgactttctggaagccatggtaattcctgccatgacaatcagcgtgctgaacacatccgaggcagaatggaccccatccgatatcatggcgccggaatgggccaggatacccgcacctaccttgaatacggagagtactacgttgatggcaatgctgacacaggatacccgcatggccagccccgcaccatgacttcttatctttttccctgaaaccttctgctcattaccttctcccatctgtgatttcctcccatatatatgacaaccacctaatctgacatcctgcccccaaaacataaaaaacgcctgggggcaatgtaagtaaaccactgtcccacagacgcttctgtctgctgccgccgcccgcggcccggctcccaaggcagtaaacgcctttggcctgctcagtttgtactgtagattagatatgcagcgcaaagagtgtctttctgcagactgatatgaaagtctgttactgataggatatgaggaacgtttctgtttggtgcggtaatgattgtaaatttatccaaatcaggccgtgataaacggatgaaaaaaacagccgtatccgcagaagggaacatatcagtgcccctgaagctctgcccatatggctgttttccattatctaaatttcctgcatgaagttttcaaacgtaattaaaagcaaaatttaaagcaaatgctttctgagctctgccccatccgcagcgctcaggtaagccggtgcaatgtcgaacacggtcttgcagccggactgcccttccctgctcagacggtatgcggccctggcatatgccgcaataacagatgcagtgaattccgggttggagtccagcttcaggctgtattcaatcacatgtccgttctcgtcattccatcccgtgctgccggtgcggataacaaaaccgccatggggaattcctgcatggtcacgcatcagttcttcctggctgataaagtgcaccgtggtgtcataatcagcaaagtagttcggcatggttacgatggcttcctcgatggcctttaaatcagctccctcctctgccaccacaaagcactccctggtgtgtttatccctggtggtaagctttggcgcttttttgcttctcactgccgtaagagctgcctccaccggaatagtgtactgtcttgcgtccttcacgcctttgattctgcggattgcatcggaatggccctggctgacgcccttgccccagaaggtataatcactgccgcccggcaggatggcattggcatagagtctgttaagggagaacatgcccggatcccagccaacggatataattcccacatgaccgctttcctttgcagccttgtccactgcctcaaaatgccgggggatattggcgtgggtgtcaaagctgtctattacattgaaatgcgctgccatttccggggtctgtccgggaaggtccgtggcgcttcctccgcagagtatcatcacgtcaatctggtccttcatggacagaacatcctctgcccggcaaaccttagccccctcagtcaatatgctgaggctgtcaggattcctcctggtgaacactgctttcagctccatgtcgggattgtgcttaacggcacactccacaccccttccaaggtttccgtagcctaagattccaactctgattgccatatttttattctcctttgtaacataatagtgtgggttgtcggtttttgtaaattatactacagccttcttttcttggcaaatcattttttatcactgcaccttgacgcagtgccagttttttgttactttcgctttctccgtcggaagcagacagctgtgcagccaatcaccgcagcagcgaggacagctcctgcataccattttaatccggatttcccggaatcttccccatcctgcacttcctcctttgacggttcctgctccgtgtccgtgacttcattttctccctccggcagccctgctgtatcctccactccatctgccggctggatttgcgggtcactgtccctgttcttttcaccccggccgcggacctgggaaggcgttgcctctttaagcatttcctctgcagtctgtccggcggctgttcccccgtctttataaccgggagcagaatacggagtataggattcccgcctgcggcctccccggcctctcaccggcgcctccggtgcgtcagactcctcctgcgtgcctggctgggcagaggaatttcctcctgatgtaacacctcccccatatccgccagaactgctgccgtagctgcctgtgtatcctcctgcatagctgtagctcccgccgtatgaaaaggtgagtccctggccaacggtctccggtatggctatctttaccttgtccgtctcacagcttcctccgggccactcgatgctggccttcacataaaaggagctgtcccctgactggaacctgtatatgagataaccatcctccacaatgcttgtattcagcgtgtttccggtctccttcaggaaattctcgtactccaccgtctcctgcccgctctgtgacgacgctgcagtcactttgttcttttcctttttccaggaatgtccgctttcactgcgcagtatgtaaagagcgttgatatcggaaggcaggttcttaaattccagcctggcagaaccgctgccgtccgctcctagattcaaaaggaccgcctctgtcagctggggctgtgtgccgccatattccggggtctggctctcaccgggaggaaccggctccggcgggtctatgcgctcatcgcggatgtctgtcttcttaagccccacaaagtccttgccttcttcccataccagcatcccctgatttctcaggataatggccggttcatccgaagcatccctttgtatctgtccccgtttcagtgtcaggcatccttccccctcaaccgatatcaggctttttgttcccgttatgagcagatttggattatcaatgacaacgcctgtctgggtcaggtttttaggtgccaggatttttatgggtccctcaggtatcctgatttcaatggggctggtactcgtctggccgtcaggaagccccagggtaagaggttttgtaattaccagattttttggcagaactgctatgctgtttccccccattaaacgctggtcgtaccattgctttaactggtcttcacctgcaatgtccaccagtacctcccctgtccccgtggatgtatccgccgtagggtcatgtacatcggcaaaggctgtgaaagcagtgagtcctgccgcccccggccccccgcacgcaaccgctgccgcacaccccccgcacagcagccacaccagggcagccatccctgcggtcatccttcctttcttgttccttctcctctttccccccgtgtctctgtccattcgtttcatcctttaaattcctttcacaccgtatcacaaagggagcagctcatcctccagcaaaattccaatcctgccgttggaagacagtatatccgacggtccggatacatccaccgctctgccggcaaaggttgtcacccttccccctgcctcttcaatcagcagcatacctgccgcaaaatcccagggattcagacaacgctcgaaatatgcatccagccttccgcaggcaacataggccagatccactgccgcggaaccggtgcgcctgatatcagaacacttgaggaatacacgcttgatatcctcaaaattcctgtctgccagatcatggttataagggctggttccaatggaaatcaggctctgccccaaatccttgacagagctgacatggatggggttcccgttgagaaacgctcccttgccccgctgtgccagaaacagctcatcctcatagggctgatatataattcccagctccatctgtcccctgtcacacagagccagcgaaagggcgctgcacctgaaatcatgaatcaggttggtagtcccgtccaccgggtcaagtatccatactgccccagaaaaatcaatgtccctgttatctttttcctcccccatgaactgtacctggggatacatgtcaaaaagtccgctgcgcatccgctcctggaccaggaaatcaacctgagtcacaaaatccgctgccccttttaccgttatcctggacgccctctcatggtccataaaaaggggccgcaccgattttaccagctcaatgaccctttctgcgtttatctccatatgttttacctcctgcagccccataatccgggacatattgcatttaatcgcctgtcacagaaggattataccacagaaacagcttttatgacatatcttcataatccatcaatggccaatcccgctcaatataaaacatatcatccatcagcagccagttggccctgaaaaaccgcatcagctgccaatacccggccccatacagattaaattccttgataaggtcaaactttgccctgatgctccttgcatcctcataccatacctcatgctggataccatactgccagtaccggaaataaggagacatggcagtttcatcaaaccggatatccactccaaaatcaactgccagcttcactgcctccagggtgcccagtgacctggctctggttactcccctttcaaaaggaaggggccagtcatagccatagttaggaattcccaggatgattttctcaggaggaatctcgctcaccgcatattccacaaccttcctcaccatattgatgggggccactgccataggaggtccctggctgtatccccactcgtaggtcatcagcataacatggttagccgcctcccccagcagccggtaatcaatgccctcatagagaagccccctctgctgggccgacgtcttaggcgcgagggccaccgtaaccgtataaccgaaaatgttgaggacctgggtggcacggcgcacaaaatcagcatactccacccggtcttccgccagcacatactcaaaatcaatgtccaggccctcgtatcccttttcctgcatcgtgcgtcccagctcccatataaggcgctgctggttttcctggcttctcaccagggctgataccagattattgttaaaacgcccgtcctctcccaggggcgtcagggtaagcaccgggcggaccccccactgcagagccctttctatcatccacgcgtcatccgccatgggaagaaccagattcccatcctcagtaaaaccataggaaaatacattgatggcgctcagataaggcagagtatcctccagtaccccgctgtcaataaagggatatgcataaccgctggaaaacaggggccttcgtccctccccgatctccccgtcagagatataaagagcctggccaacggccaggcggtatggatattctatctgatttgcccaaacaagggtctcaacgggaatcccctgggattctgcgatggagtcaacactgtctccctgtttcactacatatattttcatgcatttcattcctcagcctgaatttatacaatatatgcagcactgccggtctttaatccaccagtctcctggccatccacttcccgcttcttacgcgcaggaaggagaacaatgctcccacagcccatcctgtaggtatggaccaccatatggcactggctccgatgaaatgcgccagcaggtaggcaatggccacgcgggagaacaggtttaccactgagctgagcataaacgcccccatgtcgccggctccccgcagcagaccattgcttacgaacagggctcccatcaatatgtaaaatacagatacggttttcatatagctgagcccgtagctcatggcgctgccctcagccccctgtttcaggaaaagtcccagaagctgcggaccgaacaggaaaatgatgctggtaataataagagagaataccaccaccataaacatgctggccttatatccctgcttcacacggtccatttttctggctccgatgttttgggccgcgtagctggacatggcgttggaaaagttcatgttgggcatcattgccagggtatcaatcttagtggcagccgtataaccggccacaaacaccttcccataagaatttacaagcccctgcatcagcatcatgctgatggagacaatggactgctggagcatggagggcacgcccactttggcaatacgctcagccgaggacatatcaaaaaaagtaaatgactttcctttggcagcctcctcattttccatttttctcaggcgggctatcaatacaaaaaaggaaaaaacagcgcacatgccctgggctataagagttgcccaggccacacccgccacacccatgttgaattgaatgacaaacagcaggtccaggacaatattggtcagggccgacaccataaggaacttaagaggcgtctggctgtctcccagtgcattgtagataccgttcagcgaattatacaaaaacaggaaaacggctcccccgaaatatatcctcaggtaggcaagggagtcagccataatgtccgggtctgttcccaaaagggtcagcagaggtcccgcgatgatttccccgattcccataataataagtccaatcactcccagggatatgagggccgtggaaacagttatcttcatttcaagtatcttacctgccccgaaaaactgggaaataaccacggtacagcccatggacagccccgccgcaatggcaacggacaaaaagaccacgggaaaggatgagccaacggctgccagggcatcctcccccacaaaacgccccaccaccatggagtccaccatgttgtagagctgctggaacagattacccacgaccatgggcattgcaaagaaaaacagcaatttaagaggttttccctcagtcagattatttaccatatgtacattctcctactctgtgtttatattcaattgcattttcagcaatccgccgcagataatcctgctgctgcccgcgctcttcctctgtgaatcccgcaaaacaaatctcgtcccacctgcctgatatgcggtgtatttcttccagaacctgatttcccctgacagtaagacttacaaacttctgccttttattcttctcgttgatgagacgccgcaccagtcccttttcctccagctcagacagatttctggcaatcctgcccttgtccaggtcaaaatgggcgccgatgtcctcctgggtacactggttgtcctgaagaaacataatgattttcccctccagaggctgcagtccaaactgctctaactccctccggataaaccaaagctcacaacgcctgtatattcccgtatactgattcattctgctctccctgttatttctattgtataatgcaactgttgtatcagtcaaccattatacacagcatccgccaatttgtcaacccgcggttcatccccctgcaaagtgaaacacatttttaataaaaataaaatatttcttcccgcctgattatggtatgatacatcataacagcagccccataccagaaaggaatgaaaatcatgataagacctctgaaaaaaagcccgcgccagatggaatggaaggcgttagaaaaaaaggaggagcgttttataaccgcagcccggcatcaaaaggagcctctgctgaaccggaagctggagcgttttgtcccggaaaaactggaggataccctgaacctggcattttataaggcatttgagctgatattcaaccgaggaacatccatcatagaaaaaacataccggaaggaggatatggaaaatacctataaaatcaatgcttacgccgcagggctgaaggaaagcagaaagactatgaaggcattttccagggaagccggtaagaataaggtcaggaacctggccgcagccggtgccggcggaatcggcctgggagctttgggcatcggacttcccgacataccgctgtttaccggcatggtcctgaaaagcatctatgaaacagccataagctacggattctcttacgatacggctgaggaacaatgttatatattaaagctgatttccactgccctgtccagaggtgatgcggctgaatccggcaaccggagtctggacgccatgggacgcttaatccgcaccgggacgcctctgtctgaaacggccctgtctggaacacctctgtccggaacgttcgccggccaggacggccttgctgctcttcccggcggacctgaatcccatgatacagcctctctttgcaccagccttatgcagcaggcatcccatgccctttcctcagaactgctgtacatgaaatttttgcagggaatccccattgcgggaatcataggtggaatgtatgacgctgtttatctcaaacggatcgctgattatgcggatatgaaatataagcgcagatttctggaaaaaagcaatcctgatatataggaccgcatatagggcagatataggtcaatataggacaaactatatgtttaatttgcaaatgtcggacatttatggtaaaatataggtaaatttcagaagaaagcggggctatcaattatggataaggaagtattaagtttcgtcgtcgaaaaaactcacgaattaatgaatgcagcatcatgcagcaaagaggcaaaggcatccgcccagacctggctggatgcggttggaactgagaatgaggccgcagcaacaaaaacatacattgctgagctggaagcagacatcatgccggttgacggcctgattggctttgcagaatctgagatgggcgcccaggtcttcggggcagacaaggccaaggaagtggcagcccatgcaaaggaaatcaaggccgcaggggcaaaatactgtgattgtcctgcctgcgcagccgcagaggccattcttgaaaagaaggatgacattcttaaataagaataacagttcagacaagccgtatatcggacatatcgtatatccgattcgcataacatcaaaagagtatcccctggaaatggcggatgctcttttttctttgcagcgatgccggaatttaaccattgactttccgacacaagtgtcgtatatttaaaacagacacgagtgtcggaaattggcaaaatgaaaggcaggtgacaaaagcacgggcaaaaaaggagacaaaacaaaggccgccatacggaaagcggcactggctttatttgttcagaagggatttaaggatgttacaatgaaagatatctgtgaggcggcaggtcttagccgcggcggattatatacgcactacgggagtaccggccaggtatttgccgatatcatagaggaacttatgtcaggccttgaaagccaggttgccgggaaaatggaacggggcctgccggcgtccctcatattggacgaattattagagcgttaccagtccgagatgcttgaccggagcggttcgttaggacttgctttttatgagtattacagcggcctgccgttaacagaggacaatgccatgctgaagcagtattacagttcaaagacaatgctttgcagcctgattgaatacggcattggcaaaggcgagttcaggcaggcccatgcagacgcggttgcggatttgctgctgttctcttatcagggcgtgcggatgctgagcagtatcatgccactggacgatgataatataccagagggcatgatccgtgaaatcagatctatgttggtaaagtaaaattcatgccaggaggtgaatacggatgaagcttaaaattgcaggaagcggcggtatgtttctgattcccaaccctttttgtaaatgcccggtatgccaggaagcaagaaccaaacagggccggtacgagcgcttggggcccagtctttatattgaggacatcggaatgctcattgacacgccggaggacattgcagtcgcctgtgaaaggcagggtatttccaggattgattatctttccatctcccacaaggatcctgaccatacgcggggcatgcgaatcgtggagccgttgggttatgactgcattaccggcaagggaacccctatacagttcatagcacttccagaggttatagacgatatcaatgcctggaacggcgatggcctgtactactatcagaatattctgaactgcatttcaatcaacaggactaactatgctaaaatcggttccatagaattacacctggtaaataacaaaacccatcgtggcaatatgacattttatgttatatcagacggctccaaaaaagctgtttacgcctgctgcgatgtgaagccgtttgtccccaatgaattgtattatgacgcggatgttttaatcatcgggctggtttccgacgacggcatacttaaagacgggtcctctcttgattctgcaccgttcagagacgatatgttcaccttggacgagatgctggagctgaagcgcacatacaggataaagcgcattgtcattacccatattgatgagtactggggtaaatcctatgcttactaccgggaatttgaaaaaaagctggacaatgtatcatttgcctatgacggcatggagattgtcctatagccgccgcaggccggaaccctttatctgcgtcatgggttccccctggaccacctttttttaatctggacaaaaccccagaccaggaacagaaaaccgatcaaaacagacgctattataccggcggggctcagtgaaaactcagacccgctttttacaaacagtgactgcatcacagaaaaaacattgttggagatatgtatcatcattgttattcttatgtctcctgtcagggtgaggagtgagccgagaaccagccccatacatattgcactggcaaactgcacaggattgcggtggaaaacagcgaacaagagggccgtaataaacaccggataccaccttccatattttccgctgcagcagttaaacaggattccgcgaaataccagctcctccaggacaggcccaatcaggcccacatacaggaaataggcaggagtcctggcactgtttaagattcggctctgttcctcagccgtcatttgtcccaatgtactctgtgcaatctggggaaataggaaaaaaaggacgcggtgtgccatacacaggccaattcctgtcatggctgaaaacaggaccatctgcaagccgttcctgagccctgcctctttttttcctgccgcatggggcaggtgggaacggaaaatccatataaaaaccacgtgtgcccccgcctgggccgcatacgtaatcccggccaggaatccgtaccctgccggagcaaagaaagcctgaaccaggctgatcattacctgcgacaaaatcagccatgcggtaaacaccagaaataccataggaatcacctctgcccttcagtcaaatactcatttccctactcttcaaatgtccccttcataataacctctttatcccacacagccttcctgcctccggccataacatggaggatatccatggaatcatcgtacaccacaaaatccgcgtctgcgccttccgccacagtccccttgactcccgtcagtcccagcaccctggctgggttcttagtcaggaggttcagcaccttttccaggctggctccccgctcgcacaccagcaccttcagctgttgatgaaggcttttgggggatgcataggtgaggccgatgcactccatcttgtcattgaacctgggcgcgcttccgtacgcatcgctggacatggtcatgttaagcccctccgggtcctgcttaaggtagctcagaatctggtccgccgtctcttctaattcctcccttgtaagccctgccgtcatatcaatggttccgccccgcttcacaaattccagtccctgttcaaacagctcctgggtgcgtcccatatgggtgggaaggaacttctgaaccggcacatcgctgttgtcaatcgcatagaacagaggatccagcccggcctttccgcttcccatatggatagtgacatagccgcagcacccggagagcatgccggcccttcgggcctgggttgccagggaaatcagctgctctcctgtcagattggagcttctgtggtcgctcatggcgattttaactcccaccatcaggtcaattagagctatatcccgctccacgctccctgtgatggtgggggagggatatccgtatgctcctgtaaggatacggcaggtgattccctcttcattgaaagcccttgcctttgccagaaggttctccaggcttctggttataccgtctgtgcccaaaagtcccaccaccgtggtaatgccgtttctcaccagcacgctgaggctcgcctccggcaccctggtggcgggtccgctctcgccgcccccgcctgttatgtggacatggatatccatatatcccggtgtcaggatgtgcccgcccaggtccaccttctccacctcctcaatctggtcgtattcatctatatggtccgctatcctggctatgcggcttccttctatcagaatatcctttcttcccagatgctccggcgcatatatatctccctgtttcaatactttcatggattcatttcctctctttcagcaaaatcattacagcacggccgtaatatatatgtgcctattatattattaatatggaaaaaaagaaagtgcctgttgacggttacaggcactttcataaaacgcaggcagatatcagtccagatgcagcaaagcttctgccagagccaatatggtcagcgactgcccataggccatgggcgcaatcaatatatttttatagtggtccgcatcatatcccatgccggtgccgcccgacacattgagtacggtgccgtccctgtcaatgttgtccagaatggcttccactgccttccaggcgcaggccaaataggaatcgtccaggattccgtagcggattcccttgagaatgcccgcggtgatggcggcgctgcccgacacctcctcataactgtccgcatcggtcagcaccgtgtgccacaggccgcttttgccctgaagtcccttaagggcctcagcctgggctttatatgtatccaccacaaactcctttacaccggcattcatggtccccctgaacatgtcgatataatccagtatccctaaggtaaaccagctgtttcccctgcaccagaagattccgccgaaattattcctttcattgaaggtccagccgtggtagaaaagtccggtctccttgtcgcacagatatttaatgtgcatcagcacctggtggacggactcgtcaatccatgcctggttctggtacttctgccccatccggttgagaaagagcactgtcatgaaaatggtgtcaatccacatctcattttcattgagccgcacaccctgtcggtctccgttggcgctggtcacatgctggaaccccccttccctggtcctgggcaggcagttcatgagccagtccgcccatttcaggcacagcgtttcaaattcctggtcgtgataatactcgttaagctctgccagggtgaggaggggcgtggtggtattgatgtttttggagggaagcccttcccttatgttatccttgaaccactggtacaggaactccttataatcctcgttcttccgggcctgcatgattcttaacaggccgtacagtcccacgccctggggccagtcccattcccggattccaaaatcccgtttgaaaaagccaatgacttcaccgccctcagctaactcctccccgttctccggtccgcccagattcatgagcttttcaatgacaaggtccagcttttcctgcactttctttttatctgacgtcctaagttttacacttctcattctgattccctatcctcctactttaacaatcccaggacaccgggcagccacatgctgaatccgggcacaaaggttatgaacatcaatgccgccacaatcgccagaaagaacggaagcagctttttcatcacgtcctccacctgcagtctggcaacgctgcagcccacaaagagtacatttcccaccggaggtgtgatggtaccgatggacagattcatgacaatcatgacgccgaactggatggggtccattcccaggctctttacaatgggaaggaaaataggcgtgaagatgagcagggccggagccatgtccatgaaggttcccacaatcagcagtgttatattgatgattaacagtatgacaatccggttatcggagattcctaaaagcaggctgctgatggcctgcggcagtcctgtgaaggacaggacaaaggacagcacagaggacgcgccgataatcagcatgacaatggtggtcataaccgctgtgtccaccagtatcttggggatgtccttaatctgaatgctcttataaacaaataccgacaaaaggaaggcgtacaccactgccacgcctgaagcctcggtgggtgtgaaatagccggaaaggatgcctccaatgatgatgacaatgaggaacaggctgggaatggcctcccatatggtctttaaaatgatggccgcagtcatcttgtcccgtttcatcacatatccgtgctttgcgccgtagacgcaggccaccaccatgcacagggctgcccacaaaagtcccggcacccagcccgccatgagaagggccgcaacagagacgccgccgctggcagctgaatatacgataaaggaagcagtggggggaatcagctggcccacaggtgcagtggcaatattcacggctgctgaaaagcccttgtcgtatccctgctcctcctccagaggaagcatgacgcctccgatagctgttgccgctgcaatgcctgaaccggatatggaaccaaacatggcattgcctgctatgttggtcatggccagggaaccgggaaccctgcccagaaacagcatggccaggttaatcagccgtttggctatgccgccgctgctcatgagaagacctgccagcacaaagaagggcacggccaaaagtgtaaagctgtcaatgccgctgacaatcttctgggcagagacaaacattccaaatccgggtgtcaggaacataatgatggtcagcagtgacgctgagataatgctgaatgataccggtacgctcatggccagcatgagaaagaataccaggaccagaacaatggctgcctgaatttccatactatttttcctcctttaattcctttgcgaacgtgatgagacgctgcaggcagtataacaccatcagaacgccgcttatgggtacgcagatataatatacctgcatgggcagttccatggccggtgatatctgtccggctgagttaagggtcaccataacacctcctgctatcatcacaaagacgctgatgaacaggaccaggaattcgattccgatttttgtcctggtcaggttctttggcttaaatgtcctggtaatcaggttaatggacaggtggctctccttgccgtaggcgtagggcacccccagcatggtaagccatatgagcatgtaccttaacagttcttccgtatatttgctgggattgtgcagcaggaaacgggtgattacctgccagaagcaccccactaccataagcgccaccagaatggccagcacggtttccagaaaccggttcaatattttcatcatcttgctttcccccttcttactctgcatacttctggatatcgtcatacagggccttatagctctcgccctttgcacagaatttattatggatgggctgtactgcctgtatgaacgctgtcttgtctatgtctctgtaaacgtgcacaccgttggattcggcctcttccatggcctggtccatcattccgttgtaaagctgcttgaagttctcgttggtcttttcaaagccctttaccaggtagtcctgctgttccctggtcatgcggttccaggtcttggtgctgataatgtagatgtccggggagtactggtgctctgtatatgtataggacttcaccaaatcctgatggccgtccacggtaagggccagctccgtattctccgctccgtccacaattccctgctgcagtgaagcgtatgtctctcctgccgccatgggaaccggggttcctcccatggcctcaatcatatccatggaggtggtgttgggcatggaacgtatcttcttgccctttaatgcagacggttccacacagggcttgtcttccttcagatagaagttcctggcgccattggcatagtagcctatggctatgtagccctcgtcctccgtggacataaacagttctttcaccttctccgatttctgcatggcatcgtaataatgctgctgtccgttaaaaagatatggtactgcaaatatggagtactcctctttaaactgccccagagtgttggagctgaccttggccatgtccaggattcccgccttcaccatctcgatgatatccttttcagtcccaaggacgccgctgggataaatctgcacctccatgttcatggatgcatcctcggccacgatatctgaaatcagggcaatggaatccgctatctcggatccggccgcctggttgtgggccagcctgattaccagcttatcgctggcctttgcacttgtcacctggaaaaaggtcacacatattacggctatgcttaaaagcgccgccgcgataccgattgttttcctgcaagatttcatgttctctctccttttcatacgtgattcacgctgaatttgctgctgtgcttttgtttgactagattgtatcacaggaaggaggctgtttcttattccctgttgcattcttttttaatttttcaaactatattgctctcctctgttgacatgtccgcctttatttattacaactatactatagaaagatacatgggaacaggaggatgtggccggtatatggaaaaagtgacattttacggagagattgagggaatttccctggagcagatggtccggtacggcaaatttgacatgcgggtaaagcatttccataaccagtatgaaattttttatatcattgaaggggaacgccttttctttttcaacaacagggaatatgtggcccgctccggagacctgattctggtggacaccaacctgattcacatgacaaagtccgtcacggcagaggatacgggccacaaccgcgtcatcctgtatgtcagctatgacaggatgaaagcctttgacgggcagtacccttccctgcagctggtccggttctttcatgaacactacggggtctaccatctggacaaggagcagcaggccctgttcctcaatttctaccgcaacctgcgcattgccatgactgaaaaagcccataattacaaggtcggcattgatcttgagacccttacgtggctctttaagataacctcctatgtgtcaaagcaggagggcgccagcccccactcctcagaccatcccaaataccgcacagcctacgccatcgcagactatctctccgaaaactgcgaacagaacatatccctggaggagctggccgcacacttttatctcagtaaatattatgtctgccgcacctttaaagagattacgggatacacagtcactgagtacaccaacatacaccgcatccgcaaggccaaacgcctgctggaggagacagacatgagcatctcggagattgcccatgagctgggttatgaaagcctgacctattttgagcggatgttcaagtccttcatgactatttccccgctcaaataccgcaagaccctgaacacagtgacctataccaatgaacagaccacagaatttgaggaggacacagagcagctttcctcccaccggcagccatagattcaccacaactttgtatgattcctttcatgcatcaaaagagagagcatgccccttaacggcggaacgctccctcttttctttgtctttgtattgccttctcaatcttcctgattttctttgttcttcctatttctcatacaggaatttctcgggcaggtttacatggaaatccgctgccagatttctgaaatcctggggtgtaatggtctgtagcttgtccggacggatgctcaacacctttaccaggatttccgctgacttctcaatggtatgcatcaggccaaaggtcaaatcaaagtcctcgcccgcgcagaacaggccgtggtgggcccatacggctgcgtcgtactcttccatcagcctgctggtggccactgcaatgtcgcggccgcccggcaccatccagccaaccacgcctatgccggatgggaataccaccggacattccgtggccatttcccacagttccctggtgaatacctcgtctgtcagaggcaggacaaaggtcagcgcaatgatgttcgccggatgggcatggtaaatcaccctgtatctcccctctgttgccttcattttcacctcatggttcatcagatgggtgggcagctcgctggtgggcctgccgccctctgcgagtccccagcagatacggtagttctcccctgcctggtccacttctatgatgcagcagttggtctccggttccagaatcatgttgcgcataaaccggccgcttcccgacaccatgaaatactcccctgccagggcaggaacactggtgccgatgggctgccatttcccgtcataagaaagctcctccttcacggactccacttcctcatgtttgatgcggtagcttaagttgccgccgttcctctcatgccagttctggttaaaaccatcgtcacacacacgtatgaagccttttgcaaaggctgtgtccaatactctcattttctaatcctcactctctttctgagattcactatcctgaatttatgctgctgggataaacgtccctggctccattaacacattaactgcgttttaagagcacttccttctcataggcctggacttccttaaaccactgctccttcaccggaacctggttcatctggcagaaatagtcccatacatccccaaagggatacgttttaagctcttcctgctccatcataagctccgtgaacctgcgctcctcctgaagctttgcaagcttctcatttggcatcagcagtgcgtataaaagggccttctgcatgtttctcatgcccaccacccatgcgcagatgcggttgatgctggcgtcaaagaagtccagggccagaagcaccctgtccgggtcatttctgacgatttccttggcaatctcccttgtctcgtcgtcaaagagcaccacgtggtcgctgtcccagcgcacggggcggcttacatggagggcaatcttgtctgaaaacagcagcatggaagatatcttatcagatatcatttccgtggggtggaaatggccgctgtccagcaggcacataatacccctggaagccgcatagttcatatagaactcatgggagcccacggtacagctctccatgccaatgccgaacaccttggattccactgcgataagcaccttgctcttatcgtaatccatggccaaaatctggtccagggagtccttaagcctggccctggggctcattcggtcagccggaatatccttgaatccgtccggaatccagatattcatggcgcaggggcttcccagctcctcggcaaagtactgggatatgcgcacacaggccttacagtggtcaatccagaattttctgatttggggatcctcactggacaaagtggcgttctcagcctttggatgggagaacatggtggggttaaaatccagtcccaggcctctctccttagcaaatttcacccaatctgcaaagtgtcttggttccagtgcatctcggtccactttttccccatcctggaaaatggcatagctggcatgaaggttgattctgtgcctgcccggaatcaggttaagcgccttgtcaatatccgccataagctcctggggattcctggcctttcccggatagtttcccgttgcctgtataccgcctgacagactgtccgcgccctcaaagcccataacgtcatccccctgccagcagtgcatggaaacagggatatggttaagccgctccactgcggcgtccacgtcaacccctaatccggcgtaaatttcttttgctgattcatatctttcctgtatattcatggttctctccttttcatcattaaatcttacttatataccagtcatctgttaatccaaatgaaacaccggtacaaaatccacgcataccggactgttgtctgcattcgtttccatgatgtcggccatatagtcccaccatctgcggtttataggcgtatctgctgattcagcccagagcgcctcatcctccacttccagatacccatagagcacattggtttccctgtccagaaaaatgctgtagttatgaccgccgtactggcgtatcatctctttcatctcaggccacagcgcattgtggcgcttctcgtattcctctgccattcccggattaaggaacattttaaatcctttcctgaccatgcggtaccctcccttcgtcaaatcatttctcgtaacagcctcaacagtcatcatttatcaaaccttctcagaaggttcataggtcttgatttcaaatgagcaaaaaatactgtccctggcctccttcaggctcttaaactccttcccctctatcatctgcaccgccagattgccgatggccgtggcctccgtgggtcccgcgtaaacggtctttcctgtggcctccgccgtcaggcggtttaagtagtccgcattggctccgcctcccacgatatggatgcagtcatagcgcacgcctgtaagggcctcaatttcccggcagcagatgcggtagcagtccgccaggctgttgtaaatcacagcagccatctcccacttagtctcaggaacctgctgtccgctctcctcacagtaagttttcactgctttgcacatgctttcaggagccaggaaacggctgtcattgcagtccacaatggaggaaatggtttcgcgggaagccctcttacatatctcgccaaaggaataatcctcccctgattccttccactcctttttcatggactgaatcatccacagccccatgatgtttttaaggaaacggtacctgtactcatatccgccctcgtttgtaaagttggcctccatgctcatctcccggcagtcagcgtccttaagctctgtccccattaaggaccaggtaccggagctgatatagagcacatggtcccggttggacggtacggcggccacggcggagccagtgtcgtgggtggccggaagcaccacccggcaatccagtccggtctccttttgcacatcctcactaagccttcccaccacggttcccggcatggacagcccgccaaaaagcttctgcggatatcccagagcctcaatcagttccctgtcccaggtacgttcagagggattgaccagctgagttgtggtggcattggtatactcctgtttctgtaccccggtcaacaggaagtttaagtaatccggtatcataaggaagctttctgcctgtgaaaggatatccggctgtttttccttcacagccatcagctggtaaaccgtgttgaaaatctgtttctggataccggtcctccggtacagttcctccctggaaatccgctcatacacctttaaatccattccctcggtgcgcctgtccctgtagccggcagtcttgcccagcacatgtccctgtttgtccagaagtacaaaatccacagcccaggtgtcgatgcccatgctttccgggttgatgcccagttttttacattctctcattccggccttaatttcctcaaaaagcccaacgagattccagcacagggtcccgtccaccatttccatcccattggaaaaacggtagatttcccgcagattcatcttcccattctccatccaccccaggatatggcggccgctggaggcccctatatccactgcaagataataacggttcactgtcacacctcctagttatgagcacttggcggccgtctttgggccgcttacgtgcgatacatgtcactggcacttagcgaggtcttttacgtacctagtgcagtggctcgttatgagcacttggcgtctgtcttttagacgcttacgtgcgatacatgtcactggcacttagcgaggtcttttacgagcttagtgcagtggctcattgctttcatgatataccatataaaacaaaaaaataagaacggcatttatgaaaaaatgcgtccttatttgcacataagcagaatttgaaactgaggggcattccacgcccggaacattctatccgttcttcctgtactccttgggagacataccgtaataggtcctgaatattctgtaaaagtagctggtattgtcataccccacagcaaagctcacgtccgccaccggcatgcgcgtgctgtgcaggagaaacgcggcctggttcagccgtttaatctgcagtaattccttgtaattgcggcccagcaggcggttgatggcacggctgagccagtacacatcatatcccatcagagctgccagctctgtcaggcttccctcccggtaatgctcgtctatgtagcgcagcacctgaagggtaagctgctgctcaaaggattgttcgctgtcgcggtttacccggatccgccccgtataatgcataagatgccgcagcagcagacccatggtagtctggttcatggcctgcattccttcccgctcatgcataagggaccacaccaggttctccaccaggttctggaccggcagcacatccgcaatctggaaatgaagatagcgtccgtacctggtatcgtcgcagaggcatcccacaataaaatcccgcagcagattctcctcctcccccatcatgcggaaggccgtatcaaaaaattcgggaagaatgataaaattcaccgcaatgtcatcctgacccgcaggctggatttcctggaccgcgtgctggtttaaaaacagcagttccccttccttaagcttcagttccctgccgtccaccacatgggtggtctctcccctgcacatatagattacctccacatagttgtgggtgtgctccggaaaatgcacgaaacgggtatggggccggatggtaatgagctgtccggcttccaggagcttatcgctgtcaatgaccatgtcctcacgatccatatacagggtcctgtcaatatctgcactgcctgccagtatcttctgttcttcttctgtaatgacgctcaggctttgaatcagctcctggttcatataaatcccctttctataattaaagaaaactgacgaaaagcaatttccagacacgcaacggcgcatcctatatactctaatctccattcaccacacttaccggttcccctgcgggaaaagtattgagcagctcttctatcagccaatattttgtatccattataaaaaattatataattgtacacgaataacgcaaccttttactcccctcccccagcggaaccgtctctgtttattttaagaaactcctccatctcttccatggacaagggcttggaataatagtatccctgtatctgttccactcctatatcctcaaccagctgtctctggctttccgtttccacgccctcggcaatcactgtcattcccaggtctctgaaggcatgcaccagatgccttatggtcagggccgaggtgggattatctatggacgcccataccaggcttttatccagtttaatggttccaaacgggatgcggatcactgtggcaatattggagtagcctgtcccaaaatcatccagtcccatttcaatcccatgttttctcatctccaaggcaaaatccgtcaccacctgcgggttctctgccagcgtactctctgtaaactcgattttaacggctgacataggcgtaccgttgcgctgtatgatctccagcactttccgggacaaatccggctgggaaaactggatggcggaaaaattcacatggatggcctccatgggcagtcctttttcaatcagccggttaatatatttacagacttcatccagaatcacatacgtgagttcaataataagacccgtctcctccgcaatgggtatgaattcatttggatagaccggccctatggaggtgtgattcatgcgcatcagggactccgcgtacaggaactgcctggttctcactgagtagataggctggtaatacatctccacactgtgattagcaagctgctctttcagaatcctgatgattttcttccttctctccagtttttcaagcatctcctggtcacaataacaaatctgtccatatctgcccgtcttggcctgggacactgcgtattcgatgtaactgactgcttcctccaatgttttcacgtactccgatcgccgtataactcccatcacaacaggaagcttgaactggtaatcctggttctgccacggctgcttcatgcgggcctctatatcaaggacacattgccggacgcgttcccccctgtcattgataaacaaaagcgcaaactcatccccgctgtaccggtagacattttccttaggacctgcactgcacagaaaggcacatacctgctttaaaaaggcgtctcctccgtgctgtccgcatacattattaatctgcctgaaatcacgtatggaaacaaccagcagagtgaaatccttatccggataccttctcagtagaaggtccagcatattcagaagttcctgacggttgggtacattggtgagatagtccagggatatctgacggttctggagatgcaggtaaataatcagcagtgcgcaggtggcagcggtaccggacaatatgatattagggtacatctgttggaaaaatattacaattacagccaatactggaaatgtcgccaatatgtgataaatatggcggtctatatatcgcctgttccttaccgcaataacaatgcagccggcacagtacccataaaaaataagataggttataaaaatcaggctgccctgttcataaccctgattcgcagtgatatcaaacagacattttgtaaaaaaattagacagtaccagcaatgtatagacagctcccggaatcccgcctaacagaatcatgcggtaaagctgaggcctttcttcatacaaaacggaaaccgcataaagataatacaccagccccataagaggtgtcagtataaagtatatggtggtgattgcccatgtaacccagacaggcaccggaatatagccgcacagcataaaagtagacaggatattgctcagcatggccgcaaaagtaacggtcaggcactcctggaatatcctgtttttcagacttggcagatggctgcctttcctggcatacacccatataattcccaggataaccaatgatattgtttccggagctatgttccatctcacccttatgtacctgccatttcccacccctgcccgctgtactaaaaccccttttcaatcttttttctcaacgtgtacaaggtgtcatcatttcttaatcatataccaaatttctgtttacatcaataaccaatatgggaaatatttcttttttccagtcccggatttcctatatttataaggttctctatactgtcctttcttcatcccatgatttttaaatattttgcttttgcaaatctttttccaaacctgagaaaagcaaaaaaagttcccggctcacattgccgccgggaactttttgtcaatacaatcgcttacgcctctgctttccatccttccttcattgtgcccttaaaattcataaggcgggttgccggaaaaatcagcaatcacaccgtggggattctccaggtaaaaaacaacaaaaatgggattgtcggctgtattatactggcctttcacaatcggattggccatgcaggcttcctttacctccatattatcttcaaaaactgccctgccgtggagacgaagccacgcataagcgggatcagaaacagatacttccacctccggattggcctgcatgtccttgtacacatccttctggttgttggtgcagaaccacagctttccatctttctcaaaacagaacatgaagggacggcactttgctttcccatccctgccaacggtccccagatactgtacaggatttgcctgtaaaaaatccacaactttattcatcataattctcatccttcctttaacttattttttataccagtattataaaatgcgtaccgtgcgcctgcaagaacgcacttttaagtgggataggcacctgacagtgctatagtatcttaaagataccatttgttttacaattattttaaggtattctaacattttttgttgaaaaatcccagtaactctgttacaatcccattaagaagatcttatcttaaccaatcatttaggagggtattatggaacaaatgttattcttagtcccagtagtggggctgcttggactcctgtttgctgtcattttaagacagcaggtcgtcaaggaggatccaggcactgacaagatgcgtgagattgctgacgcaatcgcagagggcgccaatgcatttctggcttctgagtaccgcatactggtcgtttttgtagctgtgttattctttgtcatcggtttcggaacacggaactggattacagccggatgtttccttgtgggaagcggattttccaccatggccggttatctgggcatgaacgccgccatccgcgccaacagccgtaccgctaatgctgcccgtacgtccggcatgcaccgcgcactggcccttgcattctccggcggaagcgttatgggaatggccgtggtaggcttaggcctgctgggcgtaggcgttctctacataattacaagagacgtatccgttttatcaggcttcagcctgggcgcttcttccatcgcactttttgcccgtgtgggcggaggcatttacaccaaggcagctgacgttggcgctgacctggtaggcaaggtagaggccggcatcccagaggacgatccccgtaacccagctgttatcgcagacaacgtaggcgacaatgtaggcgatgtggccggtatgggtgccgacctgtttgaatcctatgtgggttccctgatttcagctctgacactgggactggttttctatcaggaagcaggcattgtttttccgctggtgctgtcagcatgcggtatcattgccgcaatcataggctccctgttagtcaagagcatcggcaattccgatccgcacaaggcattaaaaacaggcgagtacagcgcaaccgctttggtagtggtctgctcccttatcctcagccgcatattcttcggtaatttcatggctgcctttaccatcattacaggtttattggtaggcgtgctgattggagctgtcactgaaatatatacatccggcgattaccgttttgtcaaaaaaattgccaagcagtctgaaaccggctccgccaccaccattatcagcggccttgcagtgggaatgcagtcaaccgcagttcctatcctgctggtgtgtgtgggtgttctgatttccaacaaacttatgggcctttacggaattgccctggcagccgtaggcatgctgtccaccaccggaatcaccgtagccattgacgcttacggtcccatcgctgacaatgcaggcggaatcgccgagatggccggtctggacaaaaacgtcagggatataactgacaagctggactctgttggcaatacaaccgctgccatcggcaaaggttttgccatcggttctgctgcccttacagctctggccctgtttgtttcctatgctgaggcagtaaagctcaccaccattgacatccttaacgcgcatgttattgtaggacttttcatcggcggaatgctgacattcctcttctctgccatgaccatggaatccgtatccaaggccgcccatcagatgattgaggaggtacgccgccagttcagggaaaaacccggtattctcaagggaactgaccggcctgactacgcttcctgcgtatccatttccaccaaagccgcccttcgcgagatgttcctgccaggtctgatggcagtgctggcgcctctggcaaccggtctcatcctgggaccatctgcccttggcggacttctgaccggcgctctggtaaccggtgtgttaatggccatcttcatgtccaactccggcggcgcatgggataatgcaaagaagtacatcgaggaaggaaaccacggcggcaaaggcagtgattctcataaggccgctgtagttggcgatacagttggcgatcccttcaaggatacctcaggtccttccatcaacattcttattaagctgatgacgattgtgtctctggtatttgctcctctgttcctgcagtttggaggattaatttaatctcaaagccaaattctctttatggctatacaacagttaatgggaaggaaaatccaaaccacggattttccttcccattattttattaaaatcctgttgataaggggctgtatcctgccccagcaatccccgacacaatctcatccgccagcccgtccagagccttcaccacctcgtctatctgctccggcttcatgttgtcaatatggaagcctccggtgcacaccaccacccggccggtttccctgcacagtttctccgccagcctccggcacagggcctcgtccttgtggcctgtcaggttcagtatggaagatgtaacgcttatggttccgtttcctgtcagggacggccttggcactgactggaccgtacatccaatatgcggcttgtctcctccttgtataaaggccagaatatcctcccctaaaaaagcagcgcctgcctccatataagaacaggacagttcctttcgtccccttataatccagtccatctgcggtactcctttccctcgattccaaacggctccagcagcctggaagcaatatgatatatcatctcctccatattctccggcctgtgataaaaggtcatcatgggaggaattattctcactccgggcatcatggacagctcgtacatattcctcaggtgtatggggcttaagggggtctccctggctgccaggaccagcgtccgctgctccttgatggtcacatccgctgcccgcagaatcagattttcagcataccctccatggattccggcaatggtcttcatgctgcagggcacaatcagcatcccttccgcggcaaaggatccgctggcaggcccggctccaatctcatccgggcccaggacatggtcagccagcccttccacctgctccgcagacaggtccgtctcctggcctaatgtaagaacagcactgtggctcataatgagataggactcatattccggctgttcccctattaactccagacattttaccagaatgggcagcccgctggctcctgtagcccctactataatcctcttacccccacggttggcacccgtgcttctcatgaaatcttcccctcatttttctgctttacccattcggacgggtccaattccatgaacctggcccgtacaaagcggtccttctggtcaaatgggaccgtgcagtcaaaaatagtcttacaagcaatgccatggtccctgatgctcggtgtaaatgccgggtcattggacgggtccagaggatggcatctcacccccggaatggtgatggtatccacatctccctggaaccttgtgttcatggcccatagcacatcgttcatatcaaaacagtccacgtcctcatctaccaggaaaatatgcttcaattcactgaaagcggaaaaggccagaagggctgcctgtctctgcctgccttcatcactggcaacagacttcttaaactgaagcaccgccatgtattttccgcctccggcagaacagcagtatacattctgaagccggcccggcatggctttttccaccataccgtatatgctggcctctgtggggattccagccatggacacgtgttcctcgctgggcccgatgcaggtctgcataatgggatgcaccctgtgggtgaccgctttgaccttgatgagccagcactggtcgctggccggccctgtatatccgggaaattccggcatagcaaagcctgtatgggtgttctggtcctccttgactctcacgttgggaaccacctctccctcaatgacgtactccgcattggctatggccagttcatccacggtcaggcacctgcacagttttaccggctctccccgaagcgcacctgccaccgacagctcgtcataccccaatggcgtggtgggcggttcaaagcaggaaccaatctcaatggccggatccactccgatgctgatggagatgggaagcctgcggcccagctgctccgccctctccgccatggctccgatatgtctggcacctggcgtaaagaaaatggacagctcatctctgccctggatacagagcctgtggatagtcacatcatgggcccctgtatccggatgggcagcatagcacatgcccagagtaatatatgggccggcgtcataaggcgtgttagttggcgcaggaaccagcttatacaggtcaaaatccggctcatcagccctgtgcaccacctgctggcagaccggttccccctggcacatcacaggtaaaaccggcttctccacactgcggcagagcatctttcccagctcctccggcttacagtccaaaagggcagccacacgcttcctgctggccagcacgccgatggcaacactggcatcgggatgtcccttcacattgtgaaaaatcatggccgggccttccttggtaggccgctttaccgtacctcccgctcccacataccggtacaccccggataattgcgccattggctcaacctccacgtctgtttccagcagctgccccggcagctctgccaataattccagcgcacttctcaaatccctgaccttctttgccatatcataatctcctgtccggcgtttcttaccatacgcctgttatcatttcttttctcattgacggatgtttcatgcatcgtgcttctgtcacacagcttttatcacacggcttatacctcacatcttctatctcacatcttaacggaaaaggactggagaatcaattcatcttatggtataattgtttccaaattggaatgtattcacaaagcaaaccggaacatataaagaacaggcatgaatctgaatatgccctctcatatgtcccagaaagaaacggatgacagatatgacctttgaacaactggattattttattgcggccgttcaatgcgacacctttttggacgccgcggagacacttcacatcagccagtccgccctgtccaaacaaatcatgaagctggaaaaggaactggatatccagctgtgggacagaagccggcgctccgccgtcctgacagaggcagggcacatgttctacgaggaagccctgaacctgtccaaagaataccgcagaaccctctttcgaatcagcgaattcaaggaaaaagcaggccagaggctgtccatcggcaccctccccatcctgtcccagtaccatctcacagccatgctgaaggattttgcagacagccatcccctcatccatgtttttctggaggaagttgaggaacacgacctgctgcagggattttccaacaacgcctatgacctcatcatcacccgcagcaacatgctggacagtaaaacccataccttccttccattggcagaagacaggctggttgcaatcctgcctgaaaaccacagactggcagacagatcctgcatctccctgaacgacattgccggagagggcttcatactgatgcacagctatacatctatctaccatttctgtatggacctgttccagaaggctggaatccgcctccatctgctgcgcacagcccgcatggaatccattatcagcgccgtggctgtccatgaaggcatcagcctgctgccggaggaaaatttcaggctgttccaatataaagacattgtctctgttcccatagagcccgccggcaaactgtccatcggcatagccggaaaaaagcagggacaggtttcatctgccatggccgaatttctccgctatgcaaaaggttatacgcgctgaacctgctccggcaccacggcccacatacggacaggaagtcctgtggctccctcaataggagggaacactgcaaacacaatggctccggccgctggcacctggtccagattgcacatgacttccacctgcagctttcccttgtccagcagatagcgctcacaggccaggtcccctgaccgggctgccagtaccgatgcatccgtatccagcgtttcgtgtccgttggcagccgcgttccgcacctcgtagatgtatctcagtgcctccatggaccaccctggaaaatgctccccgccctcctggtcaaaatttgaaatagcgtccatatccggccaccgcctgctccaaccggtataaagggccacaaaagccccatccggaatatccccgtacgcggcctcaaactccctgatgtcctcaacggtcacagcatattccacatcttctttcaccttttcagagatatcaatgaccaccaggggaaagaccatgtccttgacgccgtactgctccgacaatgcctcccccttgataaaatgtcccggaaaatcaatatgcgtgccgaactgccccggaaatttgaaggtctgaatcagacattccagttcattcccccagtcatatacggtttttgaaagttccacagccccctccggaattcctccccagtacgggctgtcgttgttgagcgggtgggacagctcgacccagcggcacctcttaagcctctttaaatcttcccataattcatacatattccggttcctcctgtcgtatttttgcttcttttgttaaattctaatgactccattatagcgtgtacgctgggtcattacaagaaaaatacgcccaccttttatatcaccttttatatcatcccggaagcaccgcattcctgtccccggttataccgcaatccttcagagatatctttatattggtaaacggcagcgggatacggtaatggtcccaccgccagttcaggcaaacagccctggaatacccggcccggacttcaatgaaattcttctttcccttttcagccaggtaaaatcccagggttttcggaacccttcttggccccagaggtccgtccatggccgctgccagagtctttccgggacaccctgcctcctcgatcagatttctcagaaaatcccggctcctgcacccgtccggaacccttatggcctttccattacagcgttcgattatattttcaatgtaatccccgcgcccgtctgaggtaactatgaccgctatgtcacgtccctccgacagtctcctgagcagcaggttcatcaagaagctgtcctcatgccagaaaccaatgacagcgcccctgtcaggcatatctttggtccatatatcgggcatctccacttccagccgcaccgtcatctcaagcagccttaaatagccgtaatatagacggcacaagcatgcctttgccatgttcttcataaccggcatcctccttctgtcctgtcataagtccgtactgttctgctgccagatctgcaatccgtccggattcatacaattctgctgtcttacgggcctcctccgacattcctgaccagaccccccgttccaataccagccgggctgcagcggcagcaaaagcctccggggcttcttctgtcatatatccgtttattccctgtctgaccacatccacaacgccggaggccctaacggctgctacgggacagcccgcagccatggcttccagcagcacaattccctgtgtctcagacttggacgcaaacagaaaagcatctgccgcattcagataatgccgcacccgggtattctcaatcttccccgtaaatacaatctggcggctgattccaagcattcgggccaactcctccagatggcgtctctcggtaccgtccccaattaccatcagacggaagtcctgccccagtatgtccctaagacgcgcagtaccctgaaaaagaaaatccaggtttttttccttttccagccgcgctgtggtggcaaaaaggtacggacacccgttcccgtacatattccggatttcagaagaaagcatctcatcgtattggaacgaaacacggtccagacctgtgggcagtaccgatattctggtttttgtaccctgctccagaagatggtccttcatcgtggaggttggggcaaataccgggtcgcactgattggaaaatgcggtaattaaggccggaaccagaatctcctttccatacctggcaatccggcttaccggatattcgccggaagccatagcctcatataacttaaaatggtggagatattcctcataccgggtgtggtaggtgtaggctaccggtatattgtatttctttcccagatacagggccgtctgccctaccagcacaggatgatggacatgaatcacatcaaaattcccctccctgaaaaatgcttcgatttttctatcaaaacagtttcccaggatcatccctctgtccgcctttcggtaaaaaaccttaaaacgcaccacatccttctcctgctccgctgacagcttcccttccggttcaggagcaaataccgtaaccctatggcccagtgaccttaatccttccgacagccgttcaatggaaatcggcactcctcctataaatggtttgtaattgttggtaaacattgcaatattcatggggcctccttctatgataacaactgaaacacatggtcgcccatcacatatccggctccaatcaggaaaaaattccagacaaaaatgccaagggctgaacttatggtatatttaacaaaattcatccggatgacaccggcaggaatagagataatggtacgaatcatgggaatcagcttgctgatgaatattccggctgctcccctggtcctgagcagttcgaagttcctttggataaccggttcatgtttgggaaaacgtttcagataacggtccagaaataagtcccctcccatccgtccgattccatataaaatccagcttcccagaagtccggccgccaggccaagggccattaccatgaaaaaactgatctgtcctctggctgcccatatgcctgcaagcggcataatgatcccggccgggaatcccggaaggttcatatattccagcagtatgattacaaatataaaaacagctccatatctcagaaagtattgtgtcagcatctgaacatccatatgtgattcctcctaatggaccatatcataaatcaggaatctaaacttgccctccaaaaaaagcaaaaggatttctaaagaagttataagtaatttcctataccccataaaattatggggataacttctccatacattttcgtgttagaatatttttaacaaaacacagcctgatttcgcaaaaaaatcatgcactatatactctctcatggaaccgaaatgaaaaacccagagaaaacatcacaaaaaaaccaattgccagacactttaaaaggaggatttttattatggaagtgaagaaacaaaacaaaagtatgtaccattgggtaatcctggtctgctgcatcctgaccctgatgtttgcctactccacacggtttggattggcccagctgtttaccacgcaaatcattaaagagaccggctttgccaccagcgcttatttcctttcaaccacaattgccagtatcatctgtgtatttaccggacccatcgccggaaaactgttaagaggcagatatatgcgtcccaccttcgttgtctgcgtcatcggtaccatgggcttttattcctgctacggtttatgccatgagctctggcagttctatctggtgggcgcccttcagggattctttgcaatgggcgcctgtaccatacctgtgaccgtcctgatcacaaactggtttgaaaagaaccgcggactcatgatcagcatagccatgatgggaattagcctgggcggaacctttctcagtccgtttttgtcctggaccatcggaatgtttggctggcgcagggcctatttcatcctgggggctgtaagcctgtgcgtgctgatacccatttctgcctttattgtcagacgttcccctgaagatgtggggctcttcccatatggacatggagaagaaagttccggtaaacatgggaaaaacaaaagcgttccggcaaacagctggaacgccacactgagtgaagccaggaaaacaccgattctgtggatgtttgcagccggcggattcctgatttattttacatcctgtatcatgggacacatgagctactacctgcagaccactggttttgacccttcttccaccgcagcctatatctctgtctattccattgtggctctcgcgggaaagctggttctggggcatatgtttgaccgtttcggacccaagggaggcattctctttggctgcggcacattttttatcttcctcatctgcttcattatggttcagggaggtcccctcatgctgtatctgtcagctgttttctatggatttggcacctgcacggctactgtggccattcccatcatgaccaccagtattttcggttcaaaaaactacagtgagatttatggttttatctccgccttcaccatgaccggcggcgccatcggcagttccggcatcggcctggcatacgatatcaccggctcctataaacctgctctgaccatccttgccctgctcactgtcctgactattgtaatcatgttcatatgcatcaatctcagtcagaaacgcgttgaaaagccggcagataagtgtgtgcagatgccggcatagaatctgccgttccggcacagagttcatcccgccttatttctccagtctttcaatcagccgttccagcactgccctgacagccgccgggtcctttcgtcccggcggtaccctgcgccatccctgttccagagtggtataggccgcgccgcagagtgtgggttcccggcacagtctaaaaccctcacagtccatctgcaccatccaggacgttcccctgcaccaacagttcatggcaggaagacggatgtcgtcagcatctgcggccagaaacagacggtaggccggaaacgcttccaggcgcagggccagttccctgagccctctggcataatgggccggtgaaaccaccacctttcttttccccaaaagggacaggctggtgctgataaaacaggtgtctgccctgtgttccatttctcccagctgcagaatctggataaattctccctgtccgcctgtgagctgattctccaccaggccccgcagctgtctgttgatttcccttaaccgggaagctgctgcacctgttatctcattatccctgagaatatcatcaaacagctgttctccggcgctcatgaaagccggcgccggaagataggaaaacagagtctcaccggctcgcccctgttcccgcagcatcctggccgcctctgcacccaatcccatggaaaggtctgaaaacatgggacggcagctggtgagaaccatctccaccacatttctgtgctgaagtatggaatacgcatccgtgtagaccgtggcggaggtctgttccggtgacatggacatacctgcaatgctcatggcatgctccagaataaaaaaggaaaaccagtaaatgttctcatcataatactggtgataataccaccgggcattgcggtggaatataaggggactgcacagctgaaaaaatgccacaaacttgtcgaccgaaacagaaaaatgcagggccgccttaaaaacaaatccccggtccagcagccggaccatccgtaccacccattccctggcataagcagtatcctccagcagccatccagtctgctccgaatccacataaaacagctctcccggcgtctccatggcctctgcaatctccaaaagatcggaaatggcctgacgccttccctctccgctggtatatatggcaatctccgctgtacagagtgcctcagcgcgaatggtaaatgcctttggcaccgtaaaatgccggtcattcagcacgcggtaaagcagctcttctgttcccgacgatccgccagttcctgatataccctctgtcccccatatcccctccgcctctgacaggctgccgtcccccctctttcccctctctccttcttccctctttggttcctccagaggaaccagagagcggagagcatccgtcagggccatggggttctgctccagcagcatcctgcatacctcatcaaaatatacggacttagcgctgagccgcctgctgccgctgcgccatttgctcacaaggctggcgtccacatgaagccttctggccagggctgctgtggacagtcccaggcggtccatcagataacccagcgtagataattttcgttctgtcatggaaatctcctcctctaaaacatccctttcttggaagcagtgtgacccgcgggaccaccggcagtatcacccacaattccgcagacactattaccggcagcatcgcttacagtatcaccagaagcatcgcttacagtatcaccagaagcatcccttacagtatcaccggcacctcctctgacagacagctgtcatggtaccggcgctgacaaagaggccaaaccccttttcaaacaaaaaatcccttgttatactatagacataccagcaacttgcacaaaagtcaataaatattaagaaagttattggccaaaataacaatcttttttaataggtctggtccggaacagacccgtaatctgaacaacaaaactgtatatcaaagaaaggggtacgcaattcatggcagagaataaggactataaatatgtagaccactatgattttaatgaggaacttcttaaacaggcttttgccgaggcccgcaggatttacaaggagcggggcttcatgcgcaagatgggctttggaaaggctcccgccattaccaccgtagatatggccagggcctggatgagtgagggacacccgtttacctgcgaccactccgaggaagtctgcgccaatgcattaaaggtattggaagccggccgcaaatcgggcgttcccatcttccacaccaccaccggatacataggaaaacagcagtgggatcttccccgctgggatgaaaagatacctatgagcgccctggatatcaattccgaatggctggaaatcgaccccaagctgaaacctcgccctgaggagccggttatccataaaaaatatgcttccaacttcttcgggacccatctggcccagaccctgaatttcctgggtgtggatacggtgattgtcatgggcgccacatcctgtgcctgcgtaaggcatacggtcatggattccaccggatacggctttaagaccattgttccggagggaactgtgggcgaccgtgttccgggcgttattgagtggaacctgtttgacatggaagccaagtttgccgacgtggtgccggtggaggaggtcgtcaaatatctggaaggaattgattccaacgtctataccaagcatgagcgttcactggattaaccgttaatccgccaggccaggttttactaaatatgatgcgccggtccccattgtcaggaatcggcgtatcccaggtccatgaaaggagcttatatgagccttctaataaaaaatggaaccattttgaccgccgccagtgaatttacaggtgatatctatatcgagggtgagaccatccgccagattggaacgaatctgagcgtaaacgccagccggaccattgacgcttccgggaaatacgtaatgccgggaggagtggatgaacatgtccactacggttcctttggcggacgcctcttcgagacagcggaagcggcagcagcaggcggcaccaccaccattgtggactttgccccccaggaaaaggacgtaccgcttctggacgccatacggcggcaggcagccaaggcagaacacacttcctctgtggactttgcattccatgcagtcatcatggacccaaaggaatctgtatttgaggaagtcaggcatctgccggaggtgggcgtggccacactgaaactttttatggcatacaagggcactgcattttactgtgatgatgaagccatacttagcgccatgatgaatgcaaaggacgcaggcgttaccatgatggtccacgctgagaacgcggacatcataaccattctgacccgttattacctcagccagggcaagactgccccggtttaccactactatgcccgtcctcctattgcagaggaggaagccacaggcagggccattgccctggcaaaggcagcggactgcccccttttcgtggttcatgtcagcatacgggaagccatggaggccatcaggaatgctcacaatgacggctggcccattttcggggaaacctgtacccattatctgactctgaccacagactgcctggataaaccgggctttgagggagccaaatacatatgttccccgccgctgcgtccccaggagcatgtggacgccctctggcaggccgtgcgcgagggctggctgaccgcagttggttctgaccactgcgccctggacggaggatatgagggagcaaagaaaaaaggcaccaacttttccaatatccccaacggctgtcccggagtacaggatcggctggccctgctgtggacctacggtgtatgcaccggaaaaatcacccgccggaaattcgtggagctttttgccgccaatcctgccaaggtggtgggactgcccaacaagggagatctgcgcattggcgctgacgctgatgtggtaatcttcgaccctgaatggaagggaatcatcaccaacaaagacagccttcacggtattgactatgaaccatttgaaggatttgaaatccagggacggccccaacaggtctttctgcgcggccggctggtggccgaaaacggcaggttcgtaggcgaacgcggcatggggcgctggcagaaatgcaagccctatggtctgtgttatgactattatcacaaataagcgtccccgcatatatccatatgcataaaaggtgcggcagtgtcacatgaagtttccgtgatactgccgcaccctttttatcattcacaccttgacccggcctctggcttactccttaaccggacctcacttcttcggttttctccgcagctttagttcaatcccctgctcccctgccctttccagaaaaagtgtttccgcccgtttggccttttcctttagggatagcccgtccccggcttctgctgccagaaccttcattacgtcccttatatcctgcagcgttagcagattgaccgcctggcagtaaattgttttctttcgcccatcattataattctccaacagcatctccaggtgccgggacttttccatctgctcctcattataacgctccactcctatttcctctgcccgtttcatgtctttgaaccggttcctgtgtgtgatgaaggaatcatattcatcaattccctcatatatgtcacagggaaacgaacggcactgccagcaatactcaacccccgggtgctgtaagctgcaccttgccattgcgcatggctggttgccctccccgcccccgcagccaggacagtatttgcccagatacatggtgcagagtccgcaattaagcccgcacagggacagcagcctgttctcacgtttaaaccctttcatccctctcctccttttccccattcaaccattttccccaattataccattgattccatccgtctgccatccgtcatgttaatataccgctaaaaattcgttaaattattgttaatacaattttcattatatgacaataatttactctcaaatattaaaattaaccagtgattatacacaattttgtcgatataataaaacccggttacatgttctgcagacattgacatacataaataaagagagggattggaaatggtgagtgttttaatgaaaaagcttgcaatcgcagctgtggccggcgctgtcatggtatcggcttccggatgcagtctcgtttcctcaggcaaaaggattatccgcgtgtcccacgcacagtcggaaacccatcctgaacacctgggaatgcttgcatttaaggaatatgtggaagaacatctgggagataaatatgaggtgcagatatttcccaatgaaattctggggtctgcacagaaggcaatcgagctgacccagacaggagcaattgattttgtcattgcaggtacagcaaatctggagacatttgcggatgtctatgagattttcagcatgccttacctttttgactccgaggaagtgtaccggtctgtgatggaagacacagactatatggaaaatatatacaagtccacggacgaggctggtttcagggtggtaacctggtacaatgcgggaacccgtaatttttacgccaagactcccatcaacacgccggacgatttaaagggcaagaaaatacgtgtacagcaaagcccggccagcgtggacatggtcaatgccttcggcgctgccgctgctcctatgggattcggcgaggtatatacagccatccagcagggcgttatagacggtgcagagaacaacgagctggccctgaccaacaataagcacggcgaggtggccaagtattatacatacaacaagcatcagatggtaccggacatgctggttgccaaccttaagtttctaaacagcttacgtcctgaggaacttcaggtattcaaggaggcagcggccctgtccacagaggtggaattagtggaatgggataaaagcatcaaggaggcaaaacagatcgcagcccatgatatgggcgtaaccttcatcgaaacagatgtggaggcttttaaggcaaaggtactgcccttacatcagaaaatgctggaaaacaacccgaaaatccgggacttttaccaatatatacagaccgtcaatgattccaggaaaggagaccattaaaccatggacacaatgcataagttaagggcagccatcatgaagatactgggtgttgtcattacccttctgtttatccttatgaccctggttggcacctatcaaattgtgacgcgctatttcttcaaccgccccagcaccatatccgaagagcttctcacctactcctttacctggatgtcgctcctggcctccgcctatgtattcggcaagcgggaccacatgaggatgggattcatggcagacaagctgaccggaccggcccgccggtatctggaggttttcatcgacgcgctcagcttcttctttgcaggggttgtcatggtatacggcggcatctccatcacaaagctgaccatgatacagattacggcatccctgcgcatctccatgggatggatctacatcattgttcccattgctggcctgctgattatggtattcagcgtcatgaacgcagcagatatgctgcacaaagatttcagtgaaccaggggaggcaaaggtatgagtatagctgtattttgtggtcttgtgattttcgttctgctggcagtaatgctgttagcaggtgttcccatcgccattgccctggcggtatcctccatctgtgccattcttccggtgctgaacctgggggcttctgttcttacgggcgctcagagaattttctccggcatctctgttttcagtctgctggccattccctttttcatcctggccggcaacattatgaacaagggaggcattgccatccgcctaatcaactttgccaagctgttcaccggcagcattcccggcgccctggcccacaccaatgccgtggccaacatgctctttggagccatttccggctccggtacagcggctgcttctgccatgggatccatcatcggccccatcgaggaggaggaaggatatgacagggacttttctgcggcagccaacattgccacagctcccaccggccttctgattccccccagcaatgtaatgattaccttttccctggtcagcggcggcacctccgtggcagcccttttcatggcaggctatattccgggcatactctggggacttgcgtgtatggtggtcatttacttctttgccaggaagaaaggataccgcagcaccaaacgttatacaggctctgagaaggtgaaggtattcttccaggccatcccgtgtctgttcatgatcatcgttgtcattggcggcatcatttccggcattttcacggccaccgaaggaagcgtggtagccgtggtatacagcatggtcttgtccatcttcttttacaagtccatcaggctgagggagctgcctaagatttttctggacagcgcagagatgacaggcattatcatcttccttatcggagtatccagcatcatgagctgggtcatggccttcaccggcatccccaccgctgtatcggaggccatgctgggaatcagcaccaaccgctatgtgattctttttatcatcaacattctgctgctgattgtgggaacctttatggacatgacacctgcctgccttatcttcacccctattttccttcccatctgccaggcgctgggcatgaataccatacactttggaatcatgatgatattcaacctctgcatcggcaccatcactcctccggtgggaactacactcttcgtgggagtaaaggtgggaaagacaaaaatagaacaggttatacgtcctctgctctactactttggcgctatctttatcgtgctgatgctggtatcctatataccgcagctgtcgctgtggcttccgggactcatgggttatgtataaaacaggttatgcataaaacattatatataacatgtatcaaggaatggccgcgctgtgagacatcgcatcacagcacggccattccttttattcttattaaattcaggcttacgccttctttaacctcttatcctccagatgggaaacaatcactgcgcaggcagcatctcctgtaatatttaccgtggtacgtcccatgtcaaacagacggtcgataccggccacaagggcaatgccttccacaggaagccctacgctctgaagcaccatggccagcatgatcataccggagcccggcacgccggccgtgcccacggaagccagaacagctgtcagtataatgacaatctgctgggacagggtcaggttgattccataacaggaagcgataaacacagcgcacactccctggtaaatagcggttccgtccatattgatggtagcgcccagcggaagtacaaaactggcaacctcttttctggcccccaacttttccgcgcattccaggttaagaggaagggcgcccacagaagatgcactggaaaacgccattatcatggccggagccatgcccttgaaaaacttaaggggtccaatgcccgcaagagacttcacggtcagcgaatacaccaatgaggcatggagtatgtacccgatataagccaccagaagcacaaaggccaggctgcccagtatctggggtccgttggcagccacaacaggcgtaatcagacagaacacaccgatggggctcagcttaatgatgaaggacataaccgcgatggacacatcattggcgctctccacaaagtttccaaatacctctcccttctttcccgccactatggtgccgaaaccaaagagcaatgcaaccacgattacctgaagcatggatgcctcagccataggctggatgatattgcttgggaatataccaatcagggtctggataaaactgggcgtttccgctgccgtatactccagagagctggtggacagcaccggaaatccctttttgaacaggttcgcaatcaaaaggcccagagtgaccgcaaaaaaggtagtgcacatataatagatgacggttttacctccaatgcttcccaccttcttaatatccttcatggaaataacaccgttcatgatggagaacaagacaatgggaactacgatgaatttcagcaggttcagaaacaaggtgccaaagggcttgatgtaaatttccgcaatgtccggccggcccatcaacaacatgcctgccacaatacctaatgccaatccagtaaaaatccatagtgcaagtggtttctttttcatacgcataattccccttttttagtatttttgcataaatgcaattataattataacatattcttaacattattactactaaataccaaaaaagtaaatatttaacaatctctgataccattccggcaccacttcctgcttattacctcaaaccggttttacttggacgcataaaccgacatgattgaggaccagcttccacggccgtaaaaatcctcgtagccggccggataatgttcatttgtctcatccgtgcttatattttcttccaaatcagccagtttttgaagtccgcttccgtttgtgccaacgctccagatgctcatgcctccctccttatccacgcggccaaatacaagggcggagccgtccccggttagaacagggaattcactggaatattctgaatcgttagtcagttctgccacatgaccgttttccatccggtaaagctggcgccatatgggatattccacctgttctcctgtttccagctcctttgacgctgcaaaaaatatgctttttccatcgtatgacacctgcgggctctggggcaccagaccgggtgtcttaagtttctcatgaaccgcgcccttttcaggcggtatcttgaccagatccttgtctagcgccatttcccttcccgcacccgcaagaagaaacagggaattgtcctctccaaacaccacattttcattatagggcagaactacttcctcctgttctcccaacggatctatcatagtgccggacaccgtatcatagacagccgtaccaattccgtctgagcgcatggaacctgacagaacatcctgccagataaaaagcctggacgaatcaggggaccacttagccggccacagatatgggtatggttctccgtccgtctcctccatccgctcaaagaaaggcggctcctcaccgattatctgtatgaggacactgagtttcttctccttctccagattcatctggatcatccagattccctggttctgttcaaacaaggaaaggccggggtctttcctgcggtccacgtacctgcgccgggcaaatgccagtttttttccatccggagacaatgtcagcttctcacactgtatccagccgccctccaccggttccggcttccaaacttcctcctgttcccggcccatatgcaccctcacgattcctgtttccctggagctggcataaaatccctctttcccgtctgggacaaaagacaatgctccatttaaaagcagttcttctttccccgtttcaatactgcatccatagaaaccatcctgacgcagatagccggccgttctcccatccgaagaaaataagggggaagaaatgtcctttccttctgccagcctctcagtactcactgccgcatccgcatcttctgcaccattacgcaaaaacctaatcagataaagtccgtcattggccgcatataggacggaaactgttcctgatgtctcaatgtctcctttgttttcccgtgccccgctttcatccgcgcctcctttacagccggccagcagcacaagcattaaaaggccggccagacatgccgctgttcgtttcatccctattcctcctctgcttgaattatgattctattttatatccttgcaggaaggaaatccctctctaaaaaacaaataatatcttacgatttattcacagacaatctcatccttccggccaaatcacccttccggatctttatttacgtaatgggcatcaaattcaaccaccctgtactcctgtattccatgaacaaaaagcggctcattgtccaggtaatcctgtaattggcctgcatgctctgccctcatgacagacagaccgccgctcatatccgccttcaggccggacataaaaatcatcccccgctccatggctgcccgggtgcaggccatatgctcattcatgatttcatccgtcatcctgccggcgtcttttatgcttccttccaccaaaaaatacttcatatttttgtatctcctgttctgttttaatttattttatccctgctcaaacttgtttataaaaagaaaataaggcatacattttttccctgatatggtatactataaaaactacagtatctgaaaaggagggttgcaggcttatgcttaatcctatcgttatcgctgcgtagcaaaggctgctgcagctgtaccataatccggttataatggaacatggccttacatagcctttgctttcccgcttaaaataaaccacaggagagcaacatgagctatcaaaaagcggaccgtatcctgccccgtgaactgctggagcaggtacaggaatacgtggacggcgcgctgatatatataccgaagactgccgggcataaaaagtgctggggcgaggggacctccacccggcaggagcttcgtctccgcaatcagcagatttacagtgattatgtgtccggcaagagtacggacgagctgtcctccctgtactgtctgtcgcttaaaagcatacagagaatcataggccaggaaaagaaaaataaataatcaaaaaagacccggacccatgcgaatcttccgcatctgtccgggctttttgatcccatctgtatgtctcaactttatttatcaaacaagaattaggttggtatccgcctgtgaggatgttacactttttactgcccgcagaccacggctcgtagcccggcagacaggaaaggaacacaacatgaaagacatcaaatggaccatacagtatgacaggccgcctgctcctctgagacactgtaaaaaatgcaatatcaggcaggaattcgtaagctccggacagttccgggtcaacgcccagggaaagtacctggacatatggctgatctataaatgctcctgctgcagctccacctggaacgcagccatctattcccgcgtaaatcccggaagccttcctcccggtatgctctcacgctttcacgcaaatgacacttccctggctatgcagtacgccatggacaccaggttcctccgcctaaatggcgcccagatacagctgccctcctaccacgtggaaggacaggttttccaactggctgactcacctgcatcaactgacccagactcatccatggttctgcagattgacaacccatacccgcttcccctgcgggtacatgcagtattaaaaagtaaactgaaactgtcccagaaaaggctggaccagctgacgcaaagcggcaggatccaatgtgaagacggccgtgaactgaagaaaagcaggacaggaaaccatatacggctttacatcaccggcgttttaattccctgagtatgccctctgcgtccaggcccgaacacaaacgtccgtccaccatgacattgggcgccttccggcagttcttcagacagtttctggtcttaaggcacacggtcccgtcctctgatatgccgttttttcccactcccagcctttttttcagttcatccatgacagtaaggcttccctttgacacacagttccttccggtgcagaggatgatctcatggttatagggcgctgtctttaaactgggataccgcttacatatggcctgcaccatggagtcccgtaccccggcagcctccgctgcctgctccagcatataagggctgatgcagccatggatgtcctgcagttccctcaacatctccacaatggcctcctgcgaagaacgctccggcagcccgcggtagtagtccaggatttccctggtctcatcatcccgggcttcattttcatttatctgcatatgctaaacctcgcttccagtatagctttgggcctgcggggcggattttattcacaaaaacctgtttttaccccatgaattttttacagcctcttttatatcaatcccccagatagtatatggcagtaaaatggcccctggaattgtaataaagcctgttccctgtcacctggccgcagaaaaccagtcctgtttccgggtccgcaggatcagggaaaatctcctgctgatactgtgatgcccttaaaagcccggtatccgcgccggagacagctcccttcataatatagatatctcccttgtagaccgtcttcatcaccgtatcccagctggtctgccacaggtggtattcatccgtattgtaatccggcctgattcctgtctcatatccccggcctgccggttcttcccctgcttcataaagcagaaaaccataaagcctatcttcctggcccggattcagcgacagcatccggctctcgcctgtaagctcattcagagtcacccttacctgtccgccctccaaaactgtctgaagctgctccctggtaatggaagcaggaaccgatatctctcccggcacagcgtagtacgcccccatgtccgtggcctgggacaggtcaccgctcagtccggtttcatcatacctgcccagatattgcagatagggcgcgggaggtaggtcctccagtccatactggttccgcccgtccagcttgtccctgtccgtatcattttccattttctgtatcagggaaatatttccagattctacatccgacagaatggaatctgaaaaggaatccggttcaatgattcccctgtaccatcttttttctgaaaaataccggctcagcacatcggatttaaactgccttccgttggctgcatagatttcattccgaagaagccacaaattctccgtgggccagaggcatagatctgccctggacagatagcgcgaaaatacatccggaaaggtcagactgtcctcaaacagataatagtctccggccagtccaccctcccctttcactgatatatgaggatcggattcatcatccattgcaaatttaatggtatatgtaagcgccgggacccgcggaacttcttccatggtctccggtgttatcttatatgcctttttgcccttctcagtcagaatctcagcggttctcatgctgtcataataactggtatgcatctcatccggaagggtaaatacacatgtcagcctgtctgattcccagccttccccggtaagttcaaaggacaggccgcaccgtatgtcccccgctttaaaaaagcttcctgttataagctgattgcaggcttccaggttttgcactgccctgacagcggttcccggcctttccggttctgcgcccccggctggtgcggcatttccggcagccccggtacccccggccgttcctgcattcccggcagcgctggcattccctgcacccacggcatttcccccgcccccggctgccggtttccgggataggcccggttctgttcccggggcctcatgtttttcagactggccgcccgcctgttcctgctgttgtgtgacgccttcatcctggggatatgtctgctttctatccttcatcccgcaggaagtcaaaaccagcaggaccatggcggcccatccagcccttacaatctgtctcctaatcactgtaaccccattccttccattaattcggaccggatatatccatcatttcgtcccacctgttcttcctcttacaatccaggcagccggacagggcgccccgaagcagttcaatggaaaccggttttgccaaatgtccgttcatgcctgacaggcgggccctctttacatcctcagcaaaggcgtcggccgtcatggcaatgatgggaagctcccctatccgctccatcccggaaccgcgtatctccctggtagcctcgtacccattcatcacaggcatctgcacatccatgaacaccgcgtcataataaagggccgggtgggaacacactgcctccactgcctcgcggccattttcagccatctccaccctgactcccagaagtttcagcatctccgacgcaatctgccggttgagctcattatcttccaccagaaggacccgtaagccccggcaggctgcctccggccctgaaacagcaggctggatcgcttctcccgtattcccgcacttatccaggcacagagtaacggtaaacctggatcccttcccatattcactctccacacggatgtccccgtccatcatggatatcagattctttacaatggtcattcccagtccagtgccgggtaccttactggttctgctgtcatcggctctgctgaatggttcgaatatatgctccatatattcaggtttcatgccaatccccgtatcctcgatgataaaacggtaggttcccgtccgctgttcttccttcttaaactcgcatacagagaaagtgatttttcccctctggccggtatacttcgaggcattttcaaggatattcaccaacacctgcctgatacgcctggcgtcccccatgacccagggatcaaaggactcgtctatatccacctggaactcctgctggctgttttccatggaaatccgcaccatttccgccgcttccccggctaaagcccgcagattcagggggctctcagacagctccatgacaccgctttcaatcttgctcacatccaggatttcattaatcaatcccagcagatgggcgccggaggaagcgattttgttcaggtaatccctctgcttttcctcatccccaatgtgcagctgcgccagctcggtcatccctatgatggcattcatgggcgtacggatatcatggctcatgcgggaaaggaagtcgctctttgccttattcgccttctccgccttcttaagtgcatcctccagcaaaagctttgcctgccgttctttttccagggtctcctgctgcaccctgcgttcttcatcaatattcctggacagggtaatctcaatcagatcatgggtataaggactttccaccttcaccacctgggtggaattccagtgataaattccatcctcgcctatgtggggaacatccatggacagaatgcattctcccctctggaatgcctctgtcagagccttcctggtaaacttgctgcgaaactcctccctgtagtccgggtggaccgcctccatctcaaactcaatcagttcgtcaaaacggccctccggatcgggtgctttcaccggaaaccgctggtattccaccatgtgataggtattctgtgtcaggttcaccgctatcagcatctggtatgcagccttggctgccgtggccagctggctgatctccacattccgttcctgctccagtaaaagttcatcctggacatcccgaaataccaggacgcaccagcactcatcctcctggtttcctatcctggcagctgtaaactccaccgtgcggtaggaaccgttgtctgccctgcggcgcagccttctggtgatttgcttttttccctctgtaaacatacaaagcatggactccctggaaaaattctcattaaaacattccagatcgtccggatgcagtgccttttgggcgtatttgcggttctctgaaccgaaattcccctgttccggtatgtcgtcccacaccacatccttctggcagctcacataataatccctggtcaggttggcaatgatgcattcgtcaaacacagtcaccaggctgctggcatacatctggcggattttctgaaatccctgctcctcctcaaagttcaggcggtggggcgctgcggtaatcaccacagccggtaccctgccctcccagttaatccggttggcagtgacatctactgttagtttaaggagcgggtcataacaaaccatatggtttgacactctgtcccccagcatcttaaggggacagttggcgcacaattccggccatacttcatcacaccggattcccagagcagccctgccgcgtcccgtattccggcaccgctcattaaagtataacagccggtgggattcctcctcaatgacatatacgctggtttctgtcagtgaatccagcagattcatcaggttttcagctgtcatgacgccctcccatcttcctctaatcgcttatctcagccaaatccgcccgaagcttttcagcccgtttaaactgcctgcagacatcctcatacatctttgtgtagtcctccctgtcctcccttgtcctcagaggttccacaattgtgcacacagcatcgtacagaggcgtcagccccatgttgcccgtaacacccttcagggtatgggcagcctcgaaggcagacgtcatatccccctgttccagggcatttccaagtttactcaggttttcatcctgaaacagcattcccaggaacttcatatacattttcctgtttcccataaaccgtcccagagtaacctggtaatccgccccataggcttcaaatatcctttcaaaatcgtccatcttcttatgcttcctttccatatatgaaatcgtacagagtctggtacatccgttccggctctatgggcttggcaagatgggcattcatccctgccgccttgctcttttctatatcatcatcaaatgcattggctgtcatggcaataatgggaacggttcctgagtcggcattgctcagatggcggatgttggtggcggctgtcagtccgtccatcaggggcatccgtatatccatcagaattgcgtcatagtatcccttgtctgatttgctgaaaagttccagggcacgcagcccgttctcagccgtatccaccttgaatcccttgctctccaaaagcatcatggccacctctgtgttaatctggttgtcctccaccagcagcacatgtttaccggtaaaatcataatcatttacctccggctgctgcgcctgctgctccttctctcccagggctcttgaaaaggccgaaacaagggaggacttgaacatgggcttgctcatcagaaggttgaccccggccagtttcgcctcatgttcaatggaaatccagtcataggcagtcatgataatgatggtcacctctgctccgactataccgcggattcgtctggctgtctctattccatccattcccggcatcttccagtcaatcagtatcatgtcaaaataccggccttcatcccagagcttcttaacccggtcaattgccttccggccgctgtccacccactctgccttgattcccatttcgtgaagggtcacaaccgcgctctcgcacacagctacatcatcatccaccaccagtgtcttcaggtgggagaaattgtaatcctgttttttctggttatgcctgagcttttcttcttcggtgattcccagcttgacatccactgtaaactctgtaccgattcccttaatggagcggaccgtgattttgccgtccatcatatccacaatgttcttggatatggccagccccagcccggtcccgccatacagggaggtggtccctgtggattcctgtgaaaagggttcaaacagatgtggaaggaactcctcgttcatccccacccccgtatcatttacaatgaaccgcagtgatgcatcattcttggtctttctgcgctgggaggctgaaaaggtgaccttgcctccctcctgggtaaacttgatggcattgctcaggatattgatgagcacctgctggagcttcatggcatcacctatatagtaatcatccagcaccgggtccacaatgcactcatattccacccccttgacatcagcctgggagtaacagatggaattaatgccgttgatgaactcctctgttggaatcttctcgctcttgagcagcatcttgccgctctcaatccggctcatatccaggatatcattaattaacgacaataggaaccgggaggaaatgccaattttggaaatacaatcctccacctgctcgtcatcccctatggactgggccgctatggtgctcatgccgatgatggcgttcatgggagtccttatttcatggctcatccgtgagaggaagtcgctcttggccgcattggcctgctctgccgccaccagggcggcagccagctcctccttctgcctctgttcctttagaaccacgtccgtcacatcggtgcgggccacgcatacccgctccagctccctgctgatatagaaaacccggaaacgcttgacccgggtcgcaccggtcatatcccgcatctccacaatgaacgtataagcgtcgttatgggccagctgtgatttcatgtaatcgtaatccagcttacggagatattcctccctggccgcctcatccatatagcgtccggagatggcgcgtatctccgactggaaccggctgtggtccggcagcatggtatccatattggactcatccaccaatatggtcctgtacgccatatcccgcaggatatccacttctgttatgctctcataatccagctccgcgatccgcttgaaaagctgctcctgcatctttttctccgtcacatcctgggtatagaagaaaagtatgacatgaccagtctcaggattctggcaggaatgcatgatggtgctttcccagaaaattatgccgctgttgtttctgcgcaggaactcaaaacggtaatccaccttgccaaccgcgtaatcagccagcacccgctcccggttaaggcagtggcggattccatccccatagaccgggtccacggcagaggctgccaggttctcgatggtatcctcgtaggcatcacccacctttgcaatggatgtatccgcggttgacaggtaggattccaggcaccctgtggtgatattaaggcttccctgtatactcccgtcggctgaggactgttccgcaaaataggaaagctcctcctcatacatctctttaatccggtcacgcatctgcttttcttcagtgatatccatgcataccgacatgatggcaggacggttatcctcagatgtcaccctcctgcccaggtcatgtacccagatataggaaccatcctttttcctcatccggtattccaccacatactcctctgaccgttgcagctggcaggccaccagctggtccaccctgttcctgtcatccggatgcatgcagtttgtaatcattccttcaatgtcggatacaaactccgtctcgttctcataccccagatattccagcatcctgcggttaatgaaataaaatgggaaaccatcctctatgtatcctcccatcataccgcccggcagagaattgtttaaaagctcctggcgcagtctgctggtatgttccatgaccagtgtccccggataatgctccgcgtccttctggctgctggccggctctgccacatgaaaactcttgaccagccattcttccccggacaaaaccaaggtaaagaaggccctcagataccaggtgtatttggaattcttaagggtcaaatccgctgacatgttatagatcccatcagccacaggctgttcatagatgggggaaagctcacattcaaagggttccggtatctcccggatatcctgcgcaaggtacccggccatctgctgccttccgctggccatttcgtctgttcccgtgcccacaaaccccacatcctccgtcaggaatgcaagggttctttctgcgtcacgctgtacaaaccatgtgcggcagaactcccgtaatgtttcaccgggcgtcatctgtctcttcatatgttaatcctcccccaaagtcaatatctgtccgggccggttcgcccgttcccgcggtgccttcgcatggatggcccgcagcacccgccgtctcaggctcttctgggaatggggccttcccgcaaaatcatccgcccccagctccattgcccggtcctccattgcctcgttctgcgggcctgtggcaatgaccggtatatccggatccatcttttccctctgaagtacctccagcacggaaaaaccatctgtccctgaaagggtcaggctgagaatcacagcggcaatcctgcttttactgtcagccatacatcttaaggccgccttgccgtccccagcctccatcacctgaaagcttccctcaaaggtttccctaacattcctgcggtaacaggcgtcctcgtccgcgaccagaagaacaggaaacggctgagactcccggaggttttcatcgcccatcccctcttgttccatggctgtatgtccgtttctgagcagttcctcgaattcatttatgggcattggacgggcaaaataatacccctgcacatagtcgcagtccgccttcttaaggcgctccagctgctgcctggtctccactccttccgccaccacgctcaggtccatccaccgggccagctccatgataaaatggaggattccgccgtcatccggccctgcggcctcatcctggataaacttcatgtccagcttaaggatatccactggcattttgcccagcatattgagggaggaatatccgcttccgaaatcatccatctcaatgacaaagcccagttccctcagataacccactgtctcgattacctgctccgggttttcggtgtacgcgctttccgttatctccaggtgaagccgtgacggctgcagcctgtatcggcgcacgattccaagcagcatgtctgccaggtccttatggtagatatccgccctggatacattgacggacacaggaatgggaggatatcctctgttgtcccattccctgaggacggatgcagcccgttcccacacatactggtccagctttgtgatgaaaccgttttgttcaaacaagggaatgaactctccgggggactggaatccccacaccggatgtctccaccggaccagggcctctgcccctgaaagcctgtggtctttaatcctgtacttgggctgcagataaacctcaaactgcttcttcgcaagggccggctccatgctgtccgttatggcctgctcccttaaaagacggttgcgcagctggtcgtcataggccgcgaaatacgttccataccgtcccttaatgctgcgggcagccaaaagagcccggtcacacatctgctctacagacacattccggtcagccacctggtatattccccacttcatcaccacattcctggcatttggaagggtattcaccctggcattgcaccggatgaacagctcatccgtgtactcccaccgccgttccagaaggcatgcaaactggtccgcgtgaaaatgaccgcagattccattcttcccggccacctttttataaagcctgccgatctcatttagcagatggtccccggcaggaatgccgaatatatcattaatcagtttgaaattcacgatatcggagcaaatgatatcatactccctgtcaggatgctgcatcagagtttcccttacccgctggtaaaaaaattccttgctgtagagccctgtaagcctgtcatactgaaccagattaatcatggcagccgtttccctcaaatggatgatactggccaccctgtgcagaatcacctgggacttgtagggcttcgcaacaaaatcagccgcgccgtgtgacagcgccgcaacctcatcagattcgctgtcgctctgggttgttacgattaccggaatagatgaaaaggaagaatccgctttgatatgagaaagaaatgtatatccgtccataacaggcatgacgatgtccagtaaaataagagaaaccatctccccatattcacgcaggacagacagtgcttccgctccattaccggcttccagcactttatattggggcgacaggatttcccttaatatcattcggtttatttcattgtcttccacgaccaaaattttcttctgtgaaatcatcgtttcatacctttgcccggcctttacctgccgatgatactgcttatcctgcggcaaaaccaggcttcctcttcatttccttataaatatatatcgtggtttcaccaaaatagacgttcttttgacaaatttccaatggtttaaatataacaaaaacaggtagaaaatgcaataggacgctacagaaaccagctcgtatgtgcatgcaccattttcatcactccggcacttttttgtgtatattgcacaataaagcatcttcaattttctcaaattttgccatagactaaaacttttttaggtactataattctttttaagataacaatttaacatttcttttgccaatatgtatatcctggggattggcccagagtctctaccaactaccgcaaagagttggctacatatcttaatgtagccagctctttttttctgtttgtgtaaagattcgcaccaaaattggcaggaaaagtaaggaggaaatcaaaaaatgaatattgtagggcagcaagtaaaacgtgttgatgcttacgggaaggtgaccggggaggccaagtacaccgcggatctggaaccgagagacatcctgcacggtaaggtcgtgcactctaccattgccaacggcctggtcaaaagctttgacttgacagaggcctatcaggttcctggtgtggtaaagattgtcacatgcttcgatgttcccgactgccagtttcccacggcaggccatccatggagcgtggaaaagaagcatcaggatatctgtgacaggaaaatactgaaccagagggtccgcctttacggggacgatattgcggctgtcatcgctgaggatgaggtggccgcagccagggcagcccgcctgattaaagtggaatataaagaatatactcctattgttacagtggaagcagccatggcagaggatgccactcccctgcacccggatctcaggaaggacaatgtgatcgtacactcccacatgaccatgggtgacagtgaattcacctatgagagaggacttgagaaagccgggtccggttacgggcctgaggaaatcatttccctggaaaaggaatacgataccccaaggatttcccactgccacatagagctgcctgtctcatgggcctatgtggacaccaacggtaagataaccgtggtatcctccacccagattccccacatagtcaggcgctgtacagcccaggccctgggggttccaatcggaagagtccgcattataaagccttacatcggaggcggcttcggcaacaagcaggacgtgctctatgaacccttaaacgcattcctgaccatgtccgtcggcggacggcctgtcaggctggaaatcagccgggaggaaactatctcaggcacccgtacccgtcacgccatcaaaggaaaatgcaggggccttgtgacaaaggacggccgcatcctggccaggaagctggaggcctatgccaacaacggcgcctatgcatcccacggccacgccatctgcgccaactgcggcaatgtgttcaaggacctttacagagacgagctgggtaccgaggtggactgcttcaccgtatacacctcctctcccacggccggcgccatgagagcctacggcattccccaggcagcatggttcgcggaatgtctcaccgatgatctggcagacgccattggcatggatccctgtgaattcaggctaaaaaactgcatggaggatggtttcgtggacccggccaacggcatcaccttccattcttacggtctgaaaaaatgcatcgaggaagggcgacgacacatacgctgggacgagaaatggagcgcataccgcaatcagaccggcccggtccgaaaaggtgtgggcatggctatcttttgttataagacaggcgtacaccccatctcccttgaaacagcttccgcccgcatgatactcaaccaggacggctccatgcagctgtgcatgggcgccacggagatcggccagggagccgacaccgtattcacccagatggcttcccagacaaccggcatagcctttgacaaggtctacatcgtatccacccaggacacggacgtgaccccctttgacaccggggcctatgcatcccgccagacctatgtgtccggcatggcctgcaggaaatgcggcgaggaattccgccttaagatactggaatacgctgcttacatgctgagccacgatgtaagcgacctatccaaaacagtatacgctgaccaagtaaaggctgccgctgccctgctcagggagacactgggacttaaggaaggggagctggtatcaccggatatgctggacatagaaaacagtaagattgtggtaagcggcggggagcccgtgctcttcgacctgtccgtggtagcggacaccgccttctattccctggaccgttccgtacatatcacagccgaggtcactaaccagtgcaaggacaacacattttcctccggctgctgctttgtggaaatcgaggtggacattccccttggtctggtaacggtaaaggatatcatcaatgtccatgactccggaatcctcatcaatccgctgaccgccagggcccaggtccacggcggcatgagcatgggactgggatacgggctttcggaggagctgctggtggatgaaaagacaggcaggcccttaaacaataacctgctggattacaagattccaaccgccatggacacgccggacttaaacgtggcgttcattgagctggaggaccccaccggcccttacggaaacaaatccctgggcgagcctcctgccattccggtggcccccgccatccgcaacgccatcttaaacgccaccggagtccagatggatgtgactcccatgaccgctcagcggctcattgaaaaattcaaagaaaaaggtctgatataaggagaaggttatgtttgatatcaaatcattttatgaggccaaggatgtggccgacgccataaatgccctggtaaaaaatcctgacgctgaaatcataagcggcggtacagacgttctgattcgtgtcagagagggaaaggatgccggaagatccgttgtatccattcataatatagaagcattaaagggagtccgcctccttgatgacggagatctgtggataggcgcaggcactgcattttcccatatcaccaacgatgccctgatccagaaatacatacccatgcttggggacgccgtggacatggtaggcggtccgcagatacgcaataccggtactatcggcggcaatatctgcaatggagccacctccgcagactctgcttccaccatgtggaccctggaggcagatgtgctgttagagggtcctgagggcaaacgcagggtgccggtctgtgaattctatacaggtcccggacggacggtccgcgaccggaccgaggtctgtaccggtttcctggtacacagggacagcttcgaaggctggagcggccattacatcaagtacggcaagagaaaagccatggaaattgccaccctgggctgtgcggtgcgtgtaaagctgagccaggataagaagcggattgaggatgtcaggctgggatacggcgtggctggtcccactcccctgcgatgcaggaaggcggaggatggtttaaagggtcgcgcagttaatgacagtgaggctgtcctggcgttcggcaaggctgcactggaagaagtgaatccccgctcctcatggagggcgtcaaaggaattccgtctgcagctcattgaagaattatccaaacgggccctggcagaggcaataaaaaaagcaggaggtgcgatcaatgcttaagattgtacacatgaaagtaaatggtaaagaagtggaactggctgtggatgagagggaatccctgctcgataccctgcgccagcgtctggggcttacatccgtgaaaaagggctgcgaggtcggggaatgcggtgcctgtaccgttctggtaaacggagaagccatagacagctgtatctacatgaccttatgggccgagggaaaaagcatcatgacagtggaaggtttaaaggggcccaacggggaattgtcacccattcagaaggcatttatcgaggaggcagccgtacagtgcggcttctgtactcccggccttatcatgagcgcggtggagattgtgggaaccggaaaaaaatacaaccgggaagagcttaagaagctgatatccgggcatctgtgcagatgtaccggctatgagaacattctcaacgccatggaacggattgtggaggaggtatatcaggtcagccacaaaaccggcgggaccgattaactatcattttatagggggaaccaatcatgaacagcaataccaattgcagtatcaacaacatatacaaactggagggaagggtgccaatcgccaaagccatccccttcggcctccagcacatcctggccatgttcgtctccaaccttgcgcctattaccatcatagcaggagcggcacagcctgccctgagccaggcccagacagccattctgctccagaacgcaatgtttgtggcaggcatcgccactatgattcagctgtatcccatatggcggattggctctaagcttcccgttgtcatgggcgtcagctttactttcgtcaccgtcctcagcaccattgcagccaactacagttatcccgctgtggtgggagccgtgctcataggcggtatctttgaaggaaccctgggacttctggccaaatactggcgcagaatcattaccccagtggtggctgcctctgtggttacagctatcggattttcccttttcacagtgggcgccaggtcctttggcggcggatatgcagacgacttcggttccgcccagaacctgattctgggtaccatcacccttctgacctgtcttctgtggaacatctttgcaaaaggatacttaaaacagctgtccgtactggctggactgattgtggggtatgtaatcgccatcttccttgggaaagtggatttaagcctgattatgtccggcggaatcatttccttccctcatctgcttccctttatgcccgagttccatgcaggggccatcatctccgcctgcatcatcttcctggtgtccgcggcagagaccataggcgacacatcggccctggtttcaggcggtttaaaccgagaaatcacgggaaaggaaatatccggctccctggcctgcgacggctacgcatccgccctttccactgtattcggatgtccgcctgtaacctcattctcccagaatgtgggcctggtggccatgacaaaggtggtcaaccgtttcacaatcatgacaggggcggcctgcatgattttagccggactccttccgcctgtgggaaacttttttgcctccctgcctcaggccgtgcttggcggatgcaccatcatgatgttcggcaccattcttacctccggcgtacagatgattgccaaatgcggtttttctcagagaaacatagtcattgtctccctctccctggcagtgggcatcggttttaccacagccagcgaaatcgggatctgggatatcttccctgaattggttcagtctgtattttcggccaatgtggttgcggttgtatttgtggtctccgtatttttaagcctggtgcttccaaaggatatggatatcaagaccctggaagggtaaagattgtctgcgggagctgctgctccatagatgagtcatcatttatggagcagcagctccttttttatttctgtttttctttcatctaaagtcttttaactatcgttattcttttttaagtataacgttattatacaacactttttattatatgtcacctgttttttatattttgctgctttgttctgcctatgtcctgctccggcgaatatacttgtcatttttttatattatccccactttttcatcactttttcaattattttgcacaaatacctgtcttttttttccaatacatggtacaatctgtataaatattcaacaccaatcagggggaaatattatggctaaagaaatgattgcaatgcttcttgccggcggccagggctcccgtctctacgcgctgacccaaaaactggcaaaacccgcggttccttttggcggtaaataccgcatcattgattttccgctttcaaactgcgtaaattcaggaattgatacagtgggtatcctgacccagtaccagccacttgtcctgaatgagtacatcggcaacggacagccctgggatctggaccgcctgtacggaggtgtccatatactcccgccctaccagaaagcatccggttcagactggtacaagggcacggccaatgccatttatcagaatatctcctttattgaacggtacgacccgcagtatgtaatcatcctttcaggagaccagatctgcaaacaggactacagcgattttcttaaattccacaaggaaaaaggggctgaattcagtgtggctgtcatggaagtgccgtgggaggacgcgtcccgtttcggactcatggtggctgacggggatgaccgcatcaccgaattccaggaaaagccgaagaatccaaagtccaacctggcttccatgggcatctacatattcaactgggacatcctcagacagtacctcatagaggatgaagctgaccctgactctgaaaatgactttggaaacaacatcattcccaatctgctgcgtgacggacgcaggatgtatgcttatcatttcaacggatactggaaagacgtaggaaccatctcctccctctgggaggccaacatggaggtcctggatccggaacacagcggcatcaatctctttgacgaaaactggaagatatacagcagaaacagcggtatgaccggccataagattagcggcgatgccctggtggaaaattccatgattaccgacggctgccgtataaacggtcaggtcaggcattccatcctcttctccggcgtaaaggtggaggccggggcgcaggtggaggacgctgttgtcatgggcagcaccaccatcaaatcaggcgccgtggtaaaacattgtattgtggctgagaacgtggtaatcggagaaaacgcagtggtaggggccatgccctctgacagtgaaaaaggcgtggccaccattggtcccggcattgaaatcgggcccggcgccaagattggccccagtgccatggtaaagaataatgtaaaaggcggtgaagaacaatggtaaattccaatgcaaatgccctgggcatccttttccccaacagctatgattccctggttcccgatctggtcagcgagcgcctgatggcctccattccttttgccagccgttaccgtctggtggatttcatcctttccagcatggccaactgtggaattgacaatatttccctgattgtccgcagaaattatcactccctgatggaccacctgggctcaggccgcgaatgggacctgacgcgaaaaaacggcggactcaacctggttccgccttatgcagaaaagacagtgagcatctacaacggccgcgtggaagcattggccggtatcctggatttcctgaaggaacaaaaggaaaagtatgtggttatggccgatacaaacctggctgtcaactttgatttcaacgcactgattgaagcccatatggccagtcatgccgatgttaccgtggcttacaaggaggaacctcttcccattgacctcatcgaacaccgtgacatcggaaaaagcctctactataccctggccattgacaacggccgtgttaccaagatgtacatgaactcctcggaaccgggaatgcagaatatctccatgaacatctacatcattgaccgggagctcctgattagccagataaacactgcctatgtgcgcggacaggtatactttgagcgcgatatcctggcgccccagttagaaaggctgaatgtacaggcatttcgctatgacggatatgtggcgcgaatcagcagcatgaagagctattttaacgagaacatgaagatgttagacgatgtcaatgtggacgcgctcttttccgccggcaatcccatctataccaagattcgcgacgacaatccggcccggtatatcaacggctcaaaggtcagcaacatcatggctgccgacggctgcatcatcgagggtgaggtggaaaacagcatcctgttccgcggtgtcaaggtaggaaagggcgcctgggtaaagaactgtgtgctcatgcaggatacggtgatagaagcagacgccggcgtagagtatgttgtgactgataagaatgcgaccattacaaggggcaaaattataaaaggcactgttacgttcccggtgtacgtggcaaagtatcagattgtatagaaagcagctgaatgggctgaaaaaggagggtgtccgcccgggtggggacatcctccttttatctgtttctcctgttatctgtttctcctgttatctgtttcttctatttctcctgcgtcaaagcattcatcagctccgccaaatccctgacaatacatatatggttaaagggttcaaaatcccggaatgacgttgttccggtcaatacgccggcaaaatccacaccggctccggccgctgtctttgcgtccaccacgctgtcccctgtataaaggacttccttccggtccgcccccagctgctccatggcataaagcagtccctcagggcttggcttctcagcctttacatcctcagcccccactatcacgtccaccaggcctgctatctggaatttgtccagtatctggtcaatcctgtaatgatattttgtagtcacaattccaatcctgcacccctgcctgcgaagctcctcaaacgctggtccgaccgcgggatagagccttgtatgctccaccatcacctggtcagatttttctttaaaatagatactgaaccgctgtgcctcctcctggtcccggctccctgtgagacaggcgaaggtttcttttaaggacaggcctatggtctttctgatatcctccagttccccggcctcatatcccattttcttaagcccgtggttcacactggccgcaatgccctctgtgcagtctcccagggtgtaatcaaaatcaaatatcactgccttgtacttcacttttgctcctcctcatcacctcaaaatcttctccggccggaatctgagataatccgatgaaaccagcttatactcaatcccgtccacctctcccagaaagctgtcctgatatctggcttccccgtggcagtgggaatacaccacctgctctgccccgtactcctttgccatctcagtaaacccgctttccatctctccgatactggtaggaggataatgtaagaacatgatgaattggctgcagccgtccgcagcggccagctcaaaggagatgcgaagccgctccagctcccttttcaccagcttctcaaaatgttccggtgaatcctttccctcatagcagtacccctttgtccccaccagggcgtattccttgtaggcataataattattctgaagaaaggatagccgcccctgaaacatctcattcagacggtatgttttctttgcatcccagaacatgtcatgatttcccctcagcagaatttttcgtcccggcagggactggatgaaatccaaatcagccagggcctcctccagattccgtccccaggaatggtcgcctgtgatgaccaccgtgtcctctgcgccaatccttcccctccagttcttctctatcttcctcacatggtctttccattcccttccaaatacatccatgggtttattggcagtaaaggataaatgcaaatctccaatggcatacaaactcatattcacaactccccgcttattttctcgtaaaccagcagcgtccggctcaggggaaatctgttctaaaccagctcctccagttttttcttatcccaatcctgcatctcatgtcccctaatacggaaatatccctccttctccatcagcttcagctcctggttcagggaggacctgctgacatgaagcatattggccagcatcagctgggagccgggcatgcggatggtctccgcgggagcgatgttatgcattcccacaatccagtaagcgatccgctcacggatggtctggtaattgaggcagttgagataaagctggtttttaagcccccgctgggagacatacagcagcagcgcatagagaagctgcctgtctttctccagcatttcttccatcacctggaccggcacccacaacaccgtggaccgcttttcagcggccagagtataactgtactccttttcaccggaaaaatacaggaattccggaaaaatatccctggcctcaaaataagcatggcacatttccgcatcttttctggtgtgatccactgctttcagaattcctgtctccacgatgccgaagctggtaatctttgtcccctggggatggatgcactgggaagcatcgtaggtctttcttataaaataggtcctgaattcactgtttctcctgcaaaggtctgcaaagggaatcctgcaggactctccgggaattgaaaaatgttcatacatatgcggcctccaaaaaacatgaaagaggggctgcgaaaaacagctcctctttttttgatacagtctatgccggcggccggtccagtatgtcaccaaaatcatcgtaatccttttcaccgttaaaccgtaggctcctccctgtttacggcatctgtctcatcgtccgcggccgcgcagagtgctataccatcataatacggcaaagtgccggcaacatcaactacttttttctccgaagggccgtctatatactccaagcgttcaaattcccacacaaacaagtgatagttaaaacataccgcttccagaagggatccatgtgtgaaagcgcccgcagcggggcggactttatggaattttaacgaatgctttcgccatccaccggaacacaccctggggcagctcaaacacaaatacaatccccagcacaatggccaccgcggccttcacagcctcataccccgtatacacagccagccccagctgttccgtcaccaggtaatagacggtccagtaaattcctgctccaggcaccaggggaaatatgcctgatatgagaaaaatagtgacaggacaacggtttaccactgcggctgccctggacaggaatatgaccaccactgtggcggcaaaggaggcgcctgccccgctgacataaccggaagccagcacatatacagcccacccggctcctcctatcaggccgcaccagatataatattttctcggcactccaaagagcagtgaaaatgcaatggtgcccatcatggctgcacagacctgtggtatcataacaatgtacctcccgtcacccatcctgccagtgaaaatcccacgcccacgccaatggctatacagaaaaatatcagcagcgcatccatcatccgcactgatccggaaatgtaatcactgtccgcgatttcccgtatggcattggtaaagggcactccgggtataaggggcataatggatccgattaccatgtaattcagatgctgtcccattccggccagatacatggtgctgcacaggatcgtcaccagggcacccccgcttatgtttcccactattttcgacagatggggggcgctgacataaagcacgtagatgtacaaaatgataccggtcataagcgccacagagctgtcccatatactgcccccgaacagataacagaaggcagcgctgccgcaaccggatgccagcacctgcatgtatttaggctttcccggcatgctctttatacattccagcctttcagccacctctctgaccgtatacatgcctgcctctatctccctggagagctggttcacagccgccacacggtccagatgagtcccgctcaccggaatgtgctccaccttggcaaaatcaggctcattcctgctccccactgtgacgaagataccgttagtgagcacaaatgcattgccggaacagacgccgtaatagcggcatatccgttcgatggtttcctccacccgggaaatctcagctccattctccaggagcagatgccccgcctgaagggaaacctccatgacttccttctctctgttatcctgtttgaaactattctgttcagcattctgtctttgactattctgttcctgcccgtatataacttgattcccctgcattacctgctcctgcctgcttctcttttttggcctgttttctctttgttctggcttatattgtttcgtttcctctctcattttatcattccctggaaatgcttacaacccaggagtataataagacaaaaatattcaggaacgtgcatgcgcagcaagtatagatcaaaccggctctacattccccagccgctcaaatcccagatagcgcgttccctggaaggtcagttttccccggtccccctctgccagcagcccatattcagtccctgtcacggagagctccatccggtcaccgctctccacctggaacgtcgcgtaatagctggtggatgtagtggaatggaaaccatgggctcctgtggcgtcccctgcattgggatggctgtggcggctgacattggtccttttggagaccacggaagctgttaccgacagcctggggcaatgattgttcttgttccactggctcagtccctttaccgccgtaaccacaaatattcctatgatgagcacaaataccagtgtaaacatgatttcaaagccgcctccccagaaaaaggaatccatgtacataaatccacacctctctttcccgttgtatatctccatattatcatatatacagcccggtaatcttacaatttacttaatataacctaaaaaatagactattgtttagttcaccagatttacgcctagttcctgcgaatgaattacgcagacttcctgccgaacaaaaattgcagtcacaatcagggaaataaaatctgctgtgggcgttgctatccatattcctgtgacctcaaaaactgtcggtaataggattgcaaacggtatcagcagtaataactgccgaagcgcacttagaacaacagactgttttactttaccaatatactgaaaataatttgcacttatcatctgaaatcccacagcaggaagcagcagagtaaaaatgcggatacccggcacagccatatccatgagcgccttgttaccggccccgccaaaggtgcttatgatttgactgctaaatagctctatcaccaaaaacattcctgctgcaaaaatagtggcacaggttatagagtattttagtgtgctccttacccgcgtataattccccgcgctataattaaatccaaagataggctgtattccctggcctaatccaataatcggcatatagactaacatggttgtgttatacatgattccataggctgcaacccctacgtttcccccataaaatgcagcaacatgattaaatgtcagagaaaccaggcttaatgcgaactgagtaatagaagcaggagcacctgtcgacataatttttttgctggcacttagatttatattacttggctttagattccctgcggactttttagagcataaaaactgcattgccaaaagcatacaaacacagttaccaatgaccgttgataaagctgctccaaaaacaccccacttaaaaacaaatataaaaacagcgtctaaaattgtgtttgtaactacactggatagagagttcaaaaaagctcttttggcatatcccatacctttcacacagttgttcattgattgggcggtgacaaagaaaaaggaaccacttagtataactgtgatatattctttagcatacaccatgttatcagcgtttgctccgtatagggaaagcaatggcttaattgtcagcaacccgatgattgtaatggccgctgaaaacaggattgaaagcatacaagcgcttccaataattttctccgcgccctgtttatcggattttcccattttaagagaaatggaggcagatgcccctgctgcaatcagaagcgacagcgcctgaataatgagaataacaccaaatgatactgttaccgccgacaaggccgttatccctgcgcttttagctacgaatataccgtctatagctgtgtttagtgcattcaacaacaacgagagcacagccggtgctgataatgcccaaatcagttttgggattggttgtgttttgattttttctgctacttccataagcggactcctccaattcaatctttacatgagtttttactcgcgtttataatctgagtatatgctcgtatttgtcgtttgtcaatgattatgtgagttttaactcacttttattgacaaacccatcctcctatactaaaatagtaatcaggagttgataaaatggaaaacaaaaaatctgtacgtcgtccgcagcaaaagagaagtattcagatgaaagaaactatacttgaggtttcaaagtcattgttctgtgagaacggctattacaatacaactacaaatgaaattgcgaaaaccgccggtatatctattggaagtctatactcttatttccctgataaagacgctatactcacagaattgttggagcgcagcaaccaataccacttttcaaatgtgtttgaaaagctgcgccctgaatcaagtgcgcagctttatttaaaggaaccgaaaaaatggctttatgacctcgtaaatactctgattcagttacatgaagcagaaaaggatttcttacgggaattaaacgtactttattttgcaaaaccagaagttaaggcgataaaagattcacagtcggaaaaagtgcagatggcaacatatgaatatatcaggcggtatcaaagcgagctgccgtatgaagatttagaggctgtatccgttgtaatagtagatttcattacagcacttgttgatcggattatttttaaagaagcaagattagaaaaggaaaggttattaaatgcggggatagaagccttatatcggattatctccaaataattcaggccgcttttacggctgccctgcagtttgtgggtcacattctcacccgcagtccggaaagggctccggataattcacccggaaccctcttaggcataaacatgaattcactcttattaccaattgccgtaaatcctactataatatatttatgggcaaagcacacggccgccttattttatggatattcatacccgtcttcccacatacagcagccgcccttattttcagccttggcacgatacagggcctggtccgcatactccagtatggccggcagaggtttcctggtgtcccaaatgacgacaccggcggaacaacaggcccggacattgtcggcaaagggatactcacagatgctcctgcatatgtcctccccttttttgacagcgctttcccctgatttcatctgtttcataataaccacgaattcgtcaccgccaaacctggaaagtatatcgctttcccttgtctgttccctcagcagttctgcaaaagccgatatggtctggtctcccctcatatggccaaatgtatcattgatgtgttttaagttatccaaatcaaagagatacacagccaacggcatgtctttcccgtccagagcatccgcggcagcctccaggcctctgcggtttaacagtccggtcagataatcctgacaggcttccccctcaagcatgcgctcccgttccctggaggccgccgacctcatggccctcacggcacgcctttccaggacggctgcagtgtgcggcttgcgcaggaattcatctgcctccatatccaaagcctgttcctcctggcttccgtcccatgaagtggctatgacaggtatattccatactgcccgttccctccgaagcatttccaatatctgaaatccatccggttctgacagggtaaggctgatgatagctgccccaatcttattctcatagctggcaatgcaggcaagggccttctctccgtccgatgcctccacaatctgataccgggactcaaatatcctgcgcacctgcctgcaataggcatcatcctcgtccgcaatcagaagtacaggccgctgttttccgtgaaaagaaacatcctccatagacgattccatggcagcctcctccggctgttcccttatcagcttctcaaactccccgcagggcatgggtttggcaaaataatatccctgaacataatcacagccgatttccctcagctgttcaaactgctccctggtctccacgccttccgccaccacactcagatccatccaacgggcaagacccatggtaaaacgaaggattccctggctggcctgcttttccgtttcattctggataaacttcatatccagcttcagaatgtcaatgggcatcttattgagcatgttcagggaggaataaccgctgccgaaatcgtccatctctatgataaagcccaattcccgcagccgccccgccacttcaatgatctgagacgggttttccgtatacgcgctttctgttatttccagatggagccgggatgggggaagcccgtatttttggactgtctctgtcaaaatttcaggaagatccacgttataaatatccgccctggacacattgacggaaacaggtatacatggatatcccatttgctcccacctttgcaggatggcgcatgtctggtcccacacatactggtccagctgggtgatgaaaccattctgttcaaaaagaggaatgaactgtcccggcgactgaaggccccattcaggatgattccaccgtatcagggattccgccccagaaagccgttcctcctttacgctgtatttgggttggagataaatttcaaactgcccctctctcagtgcagattccatgcattccgttatagcctgttcccgcagcagcctgctgcgcagccggtcatcatatatggcaaaatattttccgtactgccccttgatgccgcaggcagccagaagagccctgtcgcacatctggtccaccggaatagtgcggtcctcaatggaataaatgccccatttcaccagcacattttttgcattgggaagggcattgacccgtgccgttgcctccatgaacatctcatcggtatacttacacctgcgctccatcagtatggcaaactggtctccgttaaaatgaccgcatatccccttgtcccctacctgggactggtaaaaatcagccacctcccgcagcagcctgtctcccgccggaagaccgaatacatcattgactaatttaaaattctcaatatcagaacaaatgatatcgtattcccgttccggatgccgggccagttcctccttcaccttctggaagaaaaattccttactgtaaagcccggtcagccggtcatattttaactggttgaccatggctgcattttcacgcagattaatgatgcttgccactctgtgcaggatgatttgtggcttgtagggtttagcaacaaaatccgaagcaccgtgggaaagggcagccacctcgtccgattcgctgtcgctctgggtggttacgataactggaatagaagaaaacacagggtcttttttcacaatggaaagaaaggtatatccatccataacaggcatggttatgtccagcagaatcagtgaaatcacatccccgcgctcctttaggacggacagggcctccagaccgttttcagcctccacgacctgatagtccgcagaaagtatctctcccagcagcatacggttaatttcattatcttccacaatcagaatttgtttttgtgatatcatgtcctaatccccttttatctgtatacgcagtatctggaccggccggccttctttgcctggtaaagggcctggtcactgcgctggagaagcgcatcaatgtccaccatggaatcgctgctctgagcgattcccacgctggctgacaaagaaacggtctgttccgctgccagaaacgctgtcctcatttctttcaaaaaggcctctgcctcctgctccatctggtccatgctgcactttcccagacggaccaccaggaattcgtccccgcccagccgggccacgaagtcgtcccggaacaatcgtctgagtacatccgccgtatgcaccagcacggcatctcccaccttatgaccatatgtgtcattgacttccttaaaccggtccaggtcaatgtacatcaggctgaccgtcctgccgccacggttgttatgtatgtactggtaaaaacatctgcggttataaagtcctgtaaggaaatctgtattagagctgtggcggatttgtttctccagatcccgctccactgtcacatccctgaaaatgcaaagcttaccggccacatgattgaatacatcatagacggaattttcgtgaatctccagcatcttacctgacccatccctccgggatacacgcgcttccatgtatccttcgctgttaatggtgcgctgttcctcaaaggcccctgttatccacgcatcatagtcctgcccgattactgcttctttgggaagcttaaaatactcctcaaattttctgttggcattaagtatcttcccgttgttatcccacaaaaggatggcatagggcatactctgcagcaaaatttctatctcagcgctcatgtttaccaggtccgtcacatcatggccgatacccacagttccaagaaccgtgacaccgtccctgtccactataggggacttataggtgcgcagctggcgcatgccgtgggatgccttgacagactccgtaaactgcagggtacgccgctcctttataaccgcatcctccgactcccggcatgaggcctccccattttcataatcatccggggataccccccatatatagcagtggttccgccccgtcacatcctccctggtctttcccaccacagagcagaacgccttattcaccttgacgtgaatcccgtccagtgtcttaaaccagagcatgtccggtatactgtctatggccgtatccaggtaggtccgggtcatgtaataatcgtagcccagcttaatctgttccatcatgcgtttcaggcgtaccttaatataatccctgacaaggggcgtctcccaaaactcatccgcagccccaaattcttccggaggcagcgcgcctatgcactggcggctgccgcagaatatgagcgaggcttccgctgcacactgggagcgcagcttagagggcggcacagagtcgtccagattccatatgagaagcctgctctccctcataatttcctgatttgcctcaggcgccactgtgatttcatgtgtaaaatgctccaatggttcgagagaacggaccagctcagagagcatggtatccttgctgaaaatcgctatcttcatcctgcatcggtacatatgatttcctccccgcggaacatcagcttttaccaaatgtatattatttaattgtagcataagcaaaatctttaatcaacaatatttaccaaatagcggggcaattgcggggcatttgaaaggcaatccatcccttcaatccaaatgacattcaatttccctatatatattttcaatctcaaatcaaaactcattcagaatatcaattggactattttttctcagctatttatactcaaataggtataaaagcgaaaaaacaagggagtttatatgtttagtttagggattgattcaggctcaaccatgaccaaaggggtcctgttcgacggaataaatgtggtaggatgccacatgcttcccacatccatgcggccgggccagattctgagggacatttacgaccggctttacacggaggaaaccaggttcgtggtgagcaccgggtatggccgtgaacttttaaaggaggcggacgccaaaatcacggaaatcacctgtcatggtgcgggcgcttcctatctggcccctggttgtgatactgtcattgatatcgggggacaggactgcaaggtcattacccttgacagccatgggcaggtaaatgattttttaatgaacgacaaatgcgcggccggcaccgggcgcttcatggaaatgattatggcccgggtaggaagcgacatctcacatctggacgacttcgtgcagggctgccggcccgtgcctattaacagcatgtgcgctgtctttgcggaaagcgagatagtaggactgatggcccaggagacgcctcccggcgacattgtacttggatgcgtccactccatctgccacaggaccgccatctttgcccagcgtctgacaggcggacatccccatattttcttctcgggaggtctggcacagtcagagattatgcgatccgtgctgggagaatatatgaacacctcccatataaccactcacccgctctctcagtataccggggccgtaggagcagccgtactgggatatgaaaaactaaagaaaaggagccgaaactgatatggaattgaagaaagaactgcccgaaatatttgaagaatttgcagatgcaaggaaaaattcgtttcttgccataaaagaattaaaggaggaaggcatacctgtggtcggtgtcttttgtacctatcttccaagggaaatccctcacgccatgggtgcctctgttgtgggactctgttctgtgactgatgaaaccatacctgacgctgaaaaggatctgcccagaaacctctgtcccctcatcaaatccagctacggctttgccaagacagacaaatgtcctttcttttatttctctgatctgattgtaggcgagacgacctgcgacggaaaaaagaaaatgtacgagatgctggctgaattcaagccggtccatgtcattgaactgcccaactgccagacagaagccggaataggactttaccgccaggaactgatacggtttaaggaggtgctggagaagaacttcggcactgtcatcaccgaggatgccatccgctgccagatacataacagaaaccagattcttgcggcccttaaccgccttcagtatgtgatggccctggacccggcaccggctcttggactggatatcgtcaacattgtttacggcacgggatttaagatgaaaattgatacactggcagaagaagtgaatgccatcacggataagattgaggctgaatacgcccagggcaggaatattggaaagagggccagaatcctggtgaccggttctccctccggcggtgccgccctcaaggtagtgcgcgccattgaagataacggcggcgtggtggtctgctttgaaaactgctccggcatgaagcccttagaccccattgatgaggataaccccgacgtatatgacgccctggccagaaagtacctgaacatcggctgttcctgcatgtcccccaaccccaggcgtatggagctgttagacaggcttattgacgatttccatgtggacggcgtggtggatttggttcttcaggcatgccacacctacaatgtggagacctccctggtgcgcaggctggtgaaggagaagaagggacttccctataccgttgtggagacagactattcccaggccgacgtgggccagctgaacacaaggatggctgccttcatcgagatgctataaggaataatctatcacgattttcctgcatgctgcgcagcaataggcgttttccactaccgctgcccccagtgtctttctggctaactgtacgccgctgttcctgtcattacgggaaaccagaccgggctcatggcgctcccttctccatgcaatgcagcgggcgtctgatgtgaggaatcctgcttccatctcttgattgcaataaggacatttcatttcttccactgcctccttgtttttcttctcattgagcatagcacagagaagaaaaaaacacaataagctcccgcatgggccaggaattggacggctggcttcaggaaccggtgttgcagtgtcattttccctgggttataatatttagtatgtcggacaaagaatcaaaggaggagatacatatggtagaaataaacagaaacgcctgcaccggctgcgggcagtgtatgagtgattgtatcgcaaacaacctgtttctgagggaaggaaaagcagaggtgtccggaaactgtatcctctgcggccactgtgttgctgtctgtcctttaaacgccgtgtccataccggaatatgatatgggagacgtggaggagctgagtcaggaacaggccggactgaattcagaccggcttctcaaggcaatcaaataccggcgcagcgtgcgaaggttcaaacagaagcctgtcagctccggggacctggatatgctgttgcaggccggacggtatacagccacagccaagaatatgcaggactgccgctttatctttgtccagaaggagctggaaatcttaaaaactcttatttgggacggaatcggccgtattctggacagccctgctccggggccggcccaggcataccggggcttttatgaggcccatatggctgattcaaaacaggactatctcttccgcaacgcgcctgccgtcctgttcattgcttctgaggcaaatatagacgcagggctggctgcccagaacatggaactgatgggtgtctcactggggcttggattcctctataacggctatctgagaagggcagctgaaatgaatccccaggttttagactggctgggagtgggagaaaaaaagatagaggcctgcgcccttctgggctatcctgatattacatataaaagaacagctcccagaagggcggcggatgtgattttccgttgaaatcacggttttcctctacatccgcctcataaaagcaatatctgctccggctgatgcaggattcatctcctcccggagcagatacatgtccggtttgttttcatgaagccagcggctgatttctgcataccgcaggatgccttcccccagctgttttggctggtatgcgcggtctttccccagactgtagtcttttatgtgcatcacgtcaatatacgtcccgacggacgcaagccactggttccagtaagcatcctgatccgtggtctccgggaattccaacagattggaggcatcgaatatcagccgcaggtgatccgggtcacccaccatccggattgtcttaagcgtggtctccaggtccgcaagaggatgccagtacacgggttcgattgccagcttcatgtcaatgcgctgcgcctcctccatgacccgcataaggctgtccatcatgtacggacaccaggcagccctttcctccctgctcaaacgtggatatgctgtctcggttcccaccacaccggctcccatttcctttgcgtaaagcaggcagtttttcaaagtctccaccgcatactcccttacactgcggtcgggattgcccaggtccatgtagcatcccatcaccggaatctccacccggttcttctcaaatgcccttctgattcgctcaatgtgggacagccggatatcctcatagctgtcaatctcctcaaataccttgggaagcgccagctgggccccatcatagccttcttcacgcagcagggatgccagcccttctatactgtgtttaccgtaatcgtgtgcgcgtacgcctattttcatcttgtatccctctctgtttgtattaatgtctgtttgtattaatccctgtttgtattaatccctgtctgtattaatctctgtctgtagtctgaaaaacagcccatcatctatcatcatacagaaataccgtctgaaaacaagaacgtggttcgccaaagaatgtgtccttatttgtatctttatgccttcttcagctgcccttactgtcttacaggaagcatcaccagtatctccgccacttcattgtccgtggcaacccgctggggaggcccccaggttcctgcgcctgaggtgacgataacctggggcgaatcaacggatgcccggtaatatccataatccacatcaaaaaccgcatccgtaatcagattaaaggggaacatctgtcccttatgggtatgcccgcagagaatcaggtctgtctcttccccatagtcccggatatttcccggctgatggtccatcacaatcacaggcagatcctctgtcctttcaggcagttccaggctcccccgccgctctccctgcccgccgataggaaatgagtcctttcttcctgccagtacaaaacggctgtctatcacaacggcctcgtcctgcagtacccggacacctgcctctgagaggaattccgtcatccggtcatagctggggccggcatcatggtttccgaggcaggcataaacaccgtaaaccgattctattttcaaaaacagttccttaagagtcccggcatcagccagggccgtggcatcgccgtcaaatatatctccggcaatacagaccaaatccggctttgtggagtttaccgcgttaatgaccttttcaaggtgatgttctcctatgacataccccagatgcaggtcgctgattagggcaatccgaagaggcgccttctcttgtgtctggcccccaatctggatttcatagggttttatctgtatcacagcgccatggactgccccatacacagaaagggccgccgaaagaagcagcggtatggctcccgcggcaacgccggccctgcatgacagcggcgccggcaagagacgaagcagtcccgccaggaacataaacaatcctgccagattaaccagcattaccatgtagacaataaaccccagaagatagtggcagacataaaaaacaggcgcaaatatgccgtttccgggaacacggctcacaataaaagcgcccagaatcccggtgacagccagaccgtaggcaattccatagggcaagggtcctatacacggaaaaagaggccccagccactggaacaatttccgtccggcattggcgaacaatccgatcacagccgcaagtgcggcaaacaggcttatcagtttcatcctatactccatctctcttcctgtaatgaagaggcgtgcatcccatgtacctggtaaatgtattggaaaaatggctgcttcccgaaaacccggctgccagcgcaatttcaagaatgctcttacccgtgtgggtcagcagatactctcccatgcgcacccggtaggaaataagataatccaccggggactggcccagtatctccttaaaatccctgcagcattcacttgtgctgacactggctgccctggcaatatcctccagccgtatcttcctggcatactcctggtggataaacgtaaggcaggaacggacccgcctgtatgggacatcggaataggaagtgtgcttttcccgttttaagtccatgttttcgtacagcgtaagccctgtctgctgaagcagaatctggagacgccacaggtaccccggaggccgtctgcagtcgcacagatacatgtcatgtatgcaggacaatgcctccttatgccatggacatgtattgtccaacagaaaaaaatccacatcggcccctgtaataaaggaggcgcactgtgcctctaccaatccgcccgaaaggccgtgaagcagataagggtccgccagcacggcgcagtaggcgctgccgcgctgatggtgatagggagcgaccatgtgcagcatattaggaggcagaagcccgccctgcccgctggaaagcacgtaagaacggaccccggtctgaaactcgatggcgcctctcagcacgtagaccaattccaattccttatgccaatgccatgggatactgcggttcgggtacaaatccagatcatccagatacacctccatgggaaatgcaggcgtgccgtggcaggttacttcctccagatttccatttacttccagatagtttaactgcatctaaagtctcctccagctcaagacaggattttgttatttttagccgctatattattacaaatttttctatagctccattataatgaaaaaaaaggacatatgcaagagattctgtttcaaaggagtgattatggagatgaagttaacttatattgccatccatactgcaaaaccggagagaatgaaggatttttatgtgaaatatttaggtgcggtcgcggatgagccgcgccctgccggcaaagatggccaggaagcagataccggcctggcagacagcacattcggcgggaccgtgtacaacctgtcctttgagggcggagtgaaaatcaggctcataccggaacggcctgttatttgtgatgccttatcttccgtatcttttgcctcagcactcatatcctccgctccatcctccatatcccctgccatgcaggcccgcccctcctatgcggtatgtctgaccttcacggttggcagcaggaaacgtgtcaacgaactcaccggccagctgataatggaaggttatgatgttatctgtgagccggggttttatggggtggagcattacagcagcagcgtttttgacccggagggaaatgtaattgaattggtggcgtaaaaaacaactgcgggcagccggatagagccatccggtgcctgtcaaaaaatgagccttcaaagggatttatccctccagaagactcatgtgttctttatccaggaccaggaggcatccacccaggccgaacccgctttctgccaataatccttctctgattttcacctctctgcgtatggtgttcatcttcctgacatccagcgcgtactgcgcattcctgagaatatatgaaacgtcaaaggacgcagagaccaccacttcggatatatcgaataaattggccacattcacgattccgatacccagatacctgccgcaggtctcaaaaacctgcagggctgccttgtccccgctctctgccaaaggcaccaaatctcctgcctgctttatctctttccctgtaagctcgctatatatccgcatcattgccttctcgcttgtatagagtcccaggcacccgcggctgccgcatttgcattccagtccatttttatcaaccgtcatatggccgatacggcctgaatttcccatctccccctgcatcaggctgccgtctgtccagatggccatgcctatccctgaacggataacaatatagagcatattctgcacatcctcaagatgggccgcttttctctccgcccaggaaagaaggtttacatcattgcatatatagaccggcttacccacatatctctgtatgatatctccaatgggtacgttctcccatccctcgatccgttcaaacagcaccgaatggttctgtttatagtcaatcactcccggaatgcccattccaacccctaaaagccggcttctgtcaatacctgaatcctgaatcaagtcatccatctgctgtttcagcagacgtatcatctggtctttatctgagtccctgggatagacacggacggaaaagcagatattctcacattccagattgctgatggccatacgcactttcggaaactccaggtcgattcccatggcataggccgcaccagcatttgcgtggtaaagcacgggatttctgccgccgttggatgtgccgtaaccgcttttaaccaccaggttgtccgctgtcatttcctgtaccaggctggttacggtcggacggctgagatgggtcatatatgctatatctgtcatggtgactgccttatgggaccagatacattcgtataccacctgcctgttggctttcttcacatcactgagattattccccttcatattccccctcctgtaacggcccaatgctttttacatttttccgtattaccatcatcattatatcttgcccctgcttccagtgtcaatagataaaaggcagccgtttcctctgtataaaacggctgcccaatatcattatcagaatttgtccagcttcttttgaatcacctgttttctcgtctccgcggcctcacgcagctgctttttgtgctcctgtatccataacaggtttgcctcaacctctttttttgccctgtcaatcatggacttcatggccttatcaccggttcctcccctgacctctctgcattttacaaaatgccagggattgatacactgggagatgggcgtaaaatcaaaagcaaaaggctctccaaagaactcatgataggcagaagaaaagaattcttcagatatattttttaaattgtaatccatggttcccgcctttttaacaagaaaactaacaaaggaatgggccttcctgaatggtatcttataagagcggtacatttggtcggcaatatcagtaaccacggaaaaactttcataggccctgctctcaagcaattctttgtttacctccagcgtactgataactgcgcggaacaactgcacatttttttggaacagctccaggcagccaaatacactatcctcgatgtcttcataatcagaaatatccccgtacgggctcttcagaaacccggtcagtaccgtatccgccattcccttcagaacagacagagaggaccgcagatgttccaatgcaatgggatttcttttctgaggcataatggagcttatggaaatgtagccgtccgccacatgaatcatattcatttcctgtgttgcccagagaagcaaatccgtaacaatcctgcccatatccaaagcacacaatcccaacgcactggctgtctgcgtcaaatagtcgctgtttccgatggcatcgtatgcattctcaatcatgcctgaaaaaccagccagctctgccacccgttctctggaaacaggaaaaccagtggtcgtcactgcggcagcgcccatgggcgactggttcactgcatcataagctctgcacagacgtttaaaatcacgttccagcatatccgcggctccgagaaaataatgtcccaataatccgggctgcgcatgctgtgtatgggtatgaattacatacaaggtgtctttatgctcctctgcaaacaatacaatggcatttttcagatacaggaactgttccatggcctgcaaaaggccatcccgcaccgccatgtgggaccatgccacgcacatgtcattgcggctcctggccagatgcagattgcccgcaataccgtctgtcgcctctatcagcttgctttccatataaaaatacaggtcttcataccgtccatcatacaccgtatttttatagaactcctgatccagttccccaagagcctttagaataacgtttccactgttttcatccacaatcccctgttccatcagcataatcagatgggcttcatttattgcctgaatatagggaagcatccggtttttagctctctcatagccaggttccagctccatggcaaccagtgccttccctgggtatttcatcccttcctgttccagcgtctgctttcttaattccgtatatgtctctggcagcctcatgccccttatgccctcctctttcatcttttcataatatacctactggtctgccacagctccgtcctcccgcagctttgtcacatataaacgcggcttgtacggatagtcattcatggccgattcatttagctctattccgattccaggtccctccggcacggtcagatagccgtccttcagagtaagagtggattttactatcctatttttaggcgcactgtcctcgcccagcggatattcctgaatcgcaaagtttggtatggccgcagccaattggatgcaggccgccgtactgaccggactcagggggttatggggcaccaccagaactcccctggcttccgccagggccgcaatctttttggcctgtgttattccaccgcacaggcatacatccgggcgtatgtactggcatgcattacgtgaaagaagcattccaaattcctctaaagtgtggagcctttcacctgtggcgatgggaatatgtattttatcagctactttttccatatcatcaaaattgtcaggtctcaccggatcttcaaaaaacatgggtctggcctgttctatttcccttcccagcgcaattgcttccggtacatttaactgtctgtgtatttcaatacaaagatctacctcatttcccaccgcctccctgtattgatagacgcgttcagacgcattgcttattttagcggcaaagctttcaagaggcatgatttccctgcggtccgaatccacaaagggcgtcagatgccctactgctgtaaatccgcgggctttggcattcctgcatccccggatcagttcttctccggtggagccgaatacatgataatagaccctggctttatgccgtacttttccccccaacagctcatagcatgggacaccgtaatatttgccctttatgtcccacagggcaatatcaattgctgacagcgctcccatgatggcagctcccctaaagtggtaacaccggtacatatactgccagtggtgctctatcaaaagaggattctgtcctatcagataccgtttgaaggtctccaccactgcctctgaggcttctaagaaggcccatgccccggattcgcccacacccgatatgccctcatccgtatccacccgtacaaacatatattgatcaatcaaccgcgtgcttacatctgttatcttcatccttactcctcctatccttttacggaaccgctggtaagacctcccaccagatacttctgggcaaacagcgcaaacaaaaaggaaggtatgcatacaatcatggaggctgccagcacatccccctgcagcatgctgtctctggaactaaagtccgcgattaccactggcaatgttttctttgactcatcaattaacagcgtgttggccagcaggaagttattccagatgccgataaacgtcatgatgccgctggccgcaagccctggcaatgccacaggaaggaatatatgccagagtgtctggatttttgccagaccatctatctccgctgcttcaatcaggtctgacgggatggtttcaaaataggactgcatggtccatatacagataggcagttcaaatgcaatgtaacacagaatcagccctttgtatgtgttaatcaatcccatcttggacatcatcagataaataggtatgataattaagatctgcggaaacatatatacaaataataccattttgctgaatgtctctttcatccggtactcatatgccttatagctgaatgcggccaggcatgcaactgccagtgtaagaatggtggaaaccaccgtaataaaaatactgttccacaggaaacgggcaattccaaattccgtaaataccttcttcacaaaatacagggaatatgtttgaggaaggatggaaggcggaagcttggttacggtctgaggactttgcagtgccgaaaccaccagccagtatacgggaaatataattggtattaccactgccactgccagaatatgtattccaatcagtttcagaagcttgctgttttttctgttcacatgtccacccccattagccatacagcttatcctgccgctttttcagtatgaaataaattgctgcaaatataattaaaatcacaaatagaatcatggttatggcagagccctctcccattctgtaactgctgaacgctctcctgtatgcataaataggagttgtctgcgtggcctcagccggtccgcctcctgtcatgacccatggcaaatcatagaaattaaatgtccatatgaatctcaggattcctgataccatgacaacaggcatcaaaagcggcaatgtgatcttacaaaaccggttccagccatttgccccgtcaatctgtcccgcttcatataagtcagaaggaatcccctgaaggcccgcaaggaacatggttataagcattggcacgccgcgccagacattggccagtataaggataaacatggctgtgtgttcattggcgatccacgctacgggttcttttaacacatgcagatctattaatatataattcatgatcccgtaaatgtcatgaaacatccacctgaatatcatggcaaccgctaccgtgggcaccagccacggcattatcaccagtcctctgaacagccccttaaaacgcaggtccggatgattcaaaaggatggcaatggccagccctaatacaacctgcggtataagtgagccaaaggtaaagataagcgaccgtcccactgcctgccagaatgaggcatcttgtaatatctttatatagtttgctatcccgacaaagttcatgaccggttttctgacgctgtagcctgtaaaactcattacaagagcatagagcatcggatataccacaattccaaatataatcagaatagccggcatataaagcaaggttccctgagtactcgtcctgtttttctttttcctgttaccagacatccggtatccacccccttttagacagagtggatattctgctgtgtctgctcagaatatccactcccaaaatgattataacagtttctccagttcgcccacaatataatccactgcctggtccgcactatacccatctgaaagcatcttaatcaggccattgcccagaatacactgggattcaaactcgccggcgcccgggaacggtccattgaccatgcctaaaccattggatgttgacagaatatcaagcgccatatccggtaccatttctttcagattgtcaggaagattttcctgatatttggtgttctggaagagatcttccttggctgggaacatggcatatggatagctgagataaaagtcaaccatgttatcacctgtaaacatatatctcacaaaatcctttgccagtcctgtattgccgtcggaagaaatactcaatccaacccatccctgtccggaacctgtcttttttcttccgggtattttaaaataagatacatcatccatgtcatcaggggcaacggactgcagtgtatagtaaatttcaggtgtgtcgattcggctcatcacagtaccgcctgccaccatttccctgacatttgtctgtgtataacccacggttccctccggcgcgcagtccttcactaatttgtagaggtagtcataggtttccaccatggcggcccggctttcatcgtccaggtcaatataccactcaccattttcatccacatttaaaaggtccacatcattggcctgcaggaaactccaaatcgttttccaggcgtggaggtctcccaaaggcagggcaaaaccatatctgtccttggatgggtctgtcacggccttacacatatcgtaatactcttcccaggttgtgggcagagtctcgataccggcctctttcagccagctgtccctgtaataagccacataaggagtgatataaagaggaacagaatataatccatcctcatatgccccctgaacggttaacgatgtacttaaaaacgcatcctttccccctatttcctccacaaggtcagatagctccagcaggcctcccgtaccagccaaggactggggataccccgttcctgtcaccataatatccggtgcgtttcctgccataatagctgatacaattttgtccatggccccgctccatggcatgactgtaatgttaatctgtgttcccggattctgttccatataagaatctgccagcttctgcagttcatcggccctctcctgctgtgtcagcatggaccacatctcaatggttcctgtcgcttcctctgcagattctgcctgggcggaatctgcattctccgcgttgttttctgatacctttacctcttgtgcatcctttgtaccggagtcagcgctctgtccgcatcctgccgcagccatcatgacggctgctcccataataacccccagtatccgtttccctttctttgtcatttttgtacctcccatcattttttattatttatcatcagaagaatacgtacagtatggacgtattctctcatattcaatctccacccctaaccccggcgcctgggggaccatgatctgccccaattcgttcagcctgataggttccggaaacatatcttttagcagtgcgtttgtattattgtcgtaatattccgcaatcaggccgttgggaacagaagccaccagatgtgcgtgtatctcctggtctccgtgaggtgccagcagcacatgggacgacatagctaaatcagctaccttcttccactctgtaatgccgcccagcacctgggcatctgcattcagcacctgggctgcatttgcctctattaactgtttaaatccccatctggtatactcattctccccaatggcaatgggtatgtccagttttctttgaagctcagcacagccttcaatatcatccggtgataaaggctcctcaaaccagtatatgttcctgcgctccagctcccttcccattttcagagcatctatccggttatatgcattattcgcatctaccagtaaatgtatatccagcccaaccgcatcccgtaccgcgtccacgcgttccaaatcttccttaatagatacgcctcctattttcatctttacggcctttgctccccgcttcaggttttccttcatttcgctctggagcatatcccatccttttccctcttcataataaccgcctgctatgtaagccggtatccggtcggcatatcctcccatcatctggcaaacgcttctgcccgccaccttaccttttatgtcccaaagggctatgtcgatgccgctgattgcccgagtagcaagcccctttcttccatatactttaggaagatacatccgttcccaaatccgctctacgttaaagggatcctggcctatgaccctgtcttttaaactcagcattgcctttatcaccatatcagagccatggacccatccaacaccgtttaccccctcatccgttactacctcgcatattacgatttcagttgcaggatatgtatatttgccgttccgaatcggatttttgtaggcagcggaatatgcgtgaatcctgatatctgtaattatcatttcggacctcccatttattatgcattttgtatgttttactattcttattcctttttctattaacactatatcactacgctgcactttatgtcaataacttttgtaaaatttatttacaaaattattttaaataactttcacagtcaaaaatggcaattgtccctgggtttatgctctgcttcgtgttgttattgggcggctgttccaatgtacaggggaaaacacaaaaaaaacaccgggaagttcagaatcttcccggtacgtttaaatattatattttcattcagacagtttccttatgctttcatgcagcatccccagccccttttccgtcctctccacatacggcgaatcagcaagatactgttccagtatcagaaggttagcctccgttgcctccacccccagttcccttaaggacagaggcatatccagatgtctcatgaactccttcaagttctccatctcccctcccaggccattatagtgaagctggacaaacaatcccactgccactatttccccgtgaagggcccgccttgcctccctggtaaaacaggttctgattccgtagtatatcatatgggccagggccgactggttaaagctccttgtaatgttagagataatgcctgtgaccgcaatgttgatgtaggtgacatactccactgcctttgtcaccgtcccccgccttatatcctctatggcctggtgtccataccgctccagcaaatcataggcaaattcagacatcctgtacgctgtatataaatcaaaggcagccgtatccggttccatggcaggcctgccgttaagcatctctatcttctttgccatggcgtccagtattccggccgccgcgtagcggcaggggcacccggagatcacatccaggtccacatataccccgtctgtttcatattcatatctccaattatccttcatggctccctggggcgtatacatgacgctcatggctgtaaaggcggcgcaggtggcaatggaggtagggatattgataacgcccactcccgcttttccagccactgcctttgacaagtccatgatgacgccgcctccaatgcccaccacttcgtcgcatcccgcgtccagacattttttaccgagggcttccgccgcctcataactgcatacaccgtcataaatctcagcaacaaactccactccggcctctgtaagaccgggaagcagccggtcctttacagcgtcaaaagccctgggaccggacacaatgtaagccttttttccaaaccgccttatctcctgtccgcagtgttccagtacgcccctgccctggcgataccttcctgcaccgaatttgacagcgctgtccatcccattgtttatcccgtttcccatcacagtatccacttatacccaatcctcataaatataatccggggcacaatacatgatttgcccgtcctttaccgtcatctcgggcttcagcagtttatccgcggtaaaggcagtccccttccagtccttataggtctgtttgaaatccatccaccggaagatggccacatccgccctggccccttccgacaggcatccaatctctccctgcattttcatcagtccggccgggcgctctgtggccatgctgaccacctggctcatggggattcccatacagatataccgggacatcaggtttggcagtgaaaaaatggggcgtctgaacatacttcccaacaccaggtccgtactgcacatatccgcaataaatccctgttccttggccttaagcatgacgtcaaaatcaccgtgcttccttccctctgccgtgtcaaagataattccccgtttcctggcttccctgacacagtcgtacaatttgccgttttcatcaatgatcgtgttcttcactccctggtatacatgttcaaagatatctccgggacgcagaaccttaagcacctcactggtgggtaccgggatgttggtgcagtgaacctccaccggacagcctgccatcccggctatacgtaccgtttcctttaacggctcaatgcccagtccctctgccagttcttcactctggcgtattttaagccccaggatattgtcccgattatcatggtacatacggacaatcttttccgggttgaaaaatttcggattgatacactcatgatagctggttgtggtcagccctgcggaacacacctgaaggaagctcttgatggtaaccctgctcctggcaatcactgccgacctgaagattggataattggcaacgccggccgaaaaatctatggcagacgtgactcctgtgggcagataggccacatccggatatatgccgatctccgtgccttcctggaacatatgggcatgggcgtcaatcagtccgggaaacacatattttcccgcggcgtccaccacatgccttgccggctccccttcctcatatctggtaattctgccgttataaatcgctatgtttcctacctgatcggtccggttggccgggtcaatcacatgtccgttcttaatcaataaatctaacattctaccacctccgggtatcttaccaaagaccaatgagtttccaataaggaaggccaatcaaaaagaaaataacaagggccattgccaccatgatggtgcccactctccagaagtccttctggggcacatagtccgacgcaaaggttataaggccggctccgtttccataatgggtaaggagggctccaaagctggcgaaaaatgcaagcagcagtcccaccaccatggggtttgcctttgtattcactgcaagggagaacagcaccggataaaaggatgccacaaacgcgctgttggagacaaagaaatagcgcaccgccagactgaccagcaccagaatcacggttactgccatgccgttcatctgggaaagatccagcacaacacccagctggtctgccagccatgtataaaatccggctgatgacagggctgaggcaatgccatagaaagcgccgtaccagataaagatactccaggcccctttggcggccattacatcattccagtccagcacatccagaagcagaacaagtgccaggaacacaaagcccaccacctgcatgctcaggttgacaaccggaagcttcggtccgaacatccatcccagaatggcaaggaggaacaggacaaacagtttcttctcagcagacgtaacagctcccagctcctttaatcccttttgcgcaagcggcttgatgtcatccagggatttgagttccggcggatagattttgtaaatcacatagggagccagcagcaaaaacaggcctaccggtacaatggatgccagaaaccaggttccccaggtaagggtaattcccaacatctcggtaatcagggacacggttatggcattggtggccataccggtcaggaacagggctgatgttccctgagagcttgcgtacatgagtacggtcagataggcgcccagccttctgggtgcattcttggcgcttgaaccggtgccctccgcaatattctggaaaataggataaataatgcttgtcctggaagagttggaaccggttgccgggcttaatacaaggtctgtaaataccataatgtagcccagactcagggtattcttgccggacttaagcagcaggttataagcaatacgcctgcccagccccgtctttacaaacgcagtacagacaatggttaccatagcgataaaccatgccatattattcccatatccctttaacaggatggatgtatccatgaacatggctgcaatgcccacgataatcagagtaatgatcggctctgaaaatggtttgattaccagtcccagcagcagccccaggtacagcgccacaatatgccaggtctccacttccaatccggccggcgccggtatgttccagatagcaattgttacggcagctatgaggaatagttttaaaaaccgtttcttttccatatatatcctccatatgttccaatcagccggcagtttctaccggcgtttccttctgttaaaaaacacaaaaccagtcacggcaaacccaatcatcatgacaaaacccactccgaatgtcagggcgattccattcatgagccacacaggcgtcaggcccacgtatatatccttccatgacatgatggtggaatagacaccatgggtatctcccgcccctgactgggagtccggatcgattgcgcgcaccagggccagcccggtggatgtgttgcctgtggcagccccaaaggccatacatgccttttcaaaccattcatccttacagaaacggtaagacaagtaaaaaatcagggggaccgtcaatccgcagatagtaaccgtatatatcaggacaggcgctatataggtagagacaaactccagattcagtgttgccatggctgtaaacaccacgatttccagaaagaatccactgagcatcttaactgtctttatgtccacataccggtccagcttcgtcatcttaagtatcttccacaggatggctcctccaaacacgccgtggagcacacccggtaatttcgtaaaaaagggaatgcaggtcccaaggaaatggaaaatggtccttcccagaaacagtgctgccagcagccatgatatctgaagcgccagatggttgatgctgatggcggttgtcactgtatggccggaagcagcccgtttttcctggggcagagtcccgccgtaaaaataggaaggctgtttctttggctcctttacatatgtaccccatccttttctgatcccataattgaccatggccattcccacaaccatggcaaatataaggccaaaggtagacagcaccattcccactgccatgttgccgtccacgcccagcttctgaaaagcagacgccgcggccgcggctgttccgtggcctccatggaatgagaaaacgcccatgacgccccatccctggggaagtccggtccatatctttgacagaacccagcccaggcctacccccaggcacatctgcatcccgtaggaggtcatggtaacacaggagtaatccagataggaactgatcttctcccggttgaaattaaccccgaacacaagggacgccatgacaatgtcaatgagcacgccgggcagttcatggaagctttccggcaccgcaatgatacccatggcctgatggcccaggagaagcagaagcagtccgccaatcagggacgagggcaggaacagcttctgtaccggcttaaagatctcccggatgaaaaaaccagccagcataaaaaccgccaatattaacatatcattgcataaagatgacactgtcatgataaatcccccgtttttcttttctgtcttctcctgtaatttcaagctttattatagcatgaaactctgtcctgccatgatttaaaagtcaaacataccggaacttttcttatttggctttttcgtgtctgtataagtcggcgcagtcacataatcaatatcattgattggccaggtaggttccttcccctcatagacctcctgtactcccatggccgcaaaataggacgccctgtgcgctgcctccattgtgtttcctccaatgtgtgggtaaatgattacattgtccagggtcagaagaggattggcaggatccaccggctccttctggatggcatccagtcccgcacctgcaatggttttattcttacatgcctcgtacagatcctgctccacaacacagccgccccttgccgtattaatcaggaaagcggtcggcttcatcatttccagacgctccttgtttaccataccgcgggtaattggggtattcggcacatgcagggaaacgtaatcgctctccttgaaaatccgatccaggtcccttaccacctcaactccctccgggaattcatccgctttcttatatgggtcataggccaggacattcatttccatgccaagcgctcgcacggccagacggcttccgatatttccgcatccgatgatacccactgtcttgccgtttactgtagtctttctggtcttaagctttgccttgtagtaatcctgaacccatattttcctcagttcaatcacattgcggctgcattccagcatcagaagcatggctgtctctgccactgaggtgctgtttgccaccggcgcgtacagggtctgtaccccgttgtcatggcatgcctttacatccagtgcgtcaaatcctgcgccgtggcgtaccaccaccttcaggttggaattagcctcgattacttccctggtgattggcgtaatacgcacaatcattgcatccggccggtgctccttcatatcagccagcacgtcctctgtctcaaagccgcgtcccctaatcagggtatgtcctgcatccactaataactgctcaccttcatccatgatttcctgtggtaataaaatcttccatcccatgttcttatctctccctgtgaattttcttttataatatgtgatttacatttatatacgtaaggttttgggcaccaaatcaatttacgattgattatggcctgtaaacatcgtcaataatttcaaatccctttgcctccagcgccttgtccacccactcacgtttggctgtgccgtttttggaagcttccagcttggcctcatctgctgcctggaatttcctggcttcctccagaatgaccgctgcgtccttgcgcggaatgacgatgacaccgtccggatctgccaggatgatgtcgcccgggttcacactgattcctccgcaggctattggtacattgacctcgcccggtccctccttgtaaggaccgcccggggtggttcctgtacagtaaaccggaaaatcccatttgccaatctcgtcgatgtcgcggattggaccgtccagaacaatgcccgccaccttctttgtataccgcagatatgccatcatgacctcgccaatcagggctcttgtactgtcctcctcattggaaaccacaatcacatccccctcattgcacatgctgagggctgcgtgcagggccagattgtcacccgccctgcatttaaccgtgtaggcaggtcccaccatcatctgcgcctttggactgctgaccaggcggatgcgcgggttcatggcacagctccttcccatgacatccgctgtgttggaggccggtatggacttaaactggttcattacctccatgtccggcatctctctttttagataaatacgtttccctactgacataacattaccttcctttcttaccaaacacttgactccttgcgagttttttgttgtaattttccttaaaaccatttgctttcctgatagttttattgtaatatatagctaatcacaaatcaaacaatgtattttcaagtttttaacaaaataaatttgtggaggttgaaatcatggatacactaagcctgtattacttctcggagcttgccaaggatctgcacatcacccgcactgccaaccgtttatttatatcccagcagacactgagcaaccatatcatgagactggaggaatattacggggtaaagctgctgaaccgtaagccctccctctcccttacatatgccggagagtatgtactgtcatttgcagagaccatgaaccgtgaaaacgcaaaccttatggatattctggcagatatacagaagcagaaacggggccttatcctgttcggcgccagcaccctgcgcatgagcgccagcctgcctgatatcctgcctgagttctcatcccggtatcccaatgtggaaatccgtatcaccgacatgaactccaagcggctggaacagttgattctgagcggagacctggacctggccatcgtcatatccgggggcgaacatcccagtatagaggaaaaacccctgatgtccgaccagatttacctttgtgctgccgatacactgcttcggaaatattatggcgacgggacagaggatttaaaacgaaaggcccgaaacatggcggatgtaaaagatttctccaggctgcctttttgtattctcaataaccgcatgggtcagaatatccagaaatgctttgacgaggccggatttgtccccaacatttacaccaccagcgcctatgtgcagatcagcacatccatcggcctaaaaggccttgccgcatgcttcgccacccgcaacagcatattgaaccagaagggtgaaatctctgaggatatcaatgtatttccgctgtactgcaagggagagcccctccttcagcagatatccgtgattcatcacaaggaccgctatctctccacctatacgcagtattttcaggaactgatactaaaatatttccatgaggttgagcagattccgattgaggaactggtaaactcgtcctctatttcactgcagtaaaaacaccaggcgtttccctgctcagtttgaaccgggaaatgcctggcgctttatctgctttatatctgtctcatcaaaacaggcgcatcgtatcttcaaatgtgatggcctgtgtttatcctattacggtcattctattatctttggccgcctcttcaatcaattgttcggatatccaaaatcggctcagatccgctgtatctctcagccatacaatccgtccgtttcggctggcatcacgtcgtacacatgtttgcaggcaaaaacgcagagccgaatcatccgtaagcatgacaacaggcagctttgcgcctgcagtgattgcaactgtttgtcctgcctgtatagttccaaattccggtatttccacctcagacaacagctgctcaaaagcattcttctcattgctcacaccatacccccactactcttcatgttttccccagccctccaattattcaatgttaaaaccagcttctctccatccagctacttgtcatattttaaaaggtccggcacaagaaccggaccatatgaaacaattatatctatacaatttttccaggattcagaattccctttggatcgaacacacttttgattcccgacatcagccccatctgttcctcacccagctgatgtttcaggtactctctctttgcaaagccaattccatgctcaccagatacaagccctccatattcttccgactttctgtacatccgttcaaaggcctcctgcttttttttcctccatgtatcttcatccatttggtcccggcagagatacacatggaggttaccatctccggcatggccaaagcttggaatcctcatattcaattctgctgcagtctgatgcgtaaatttaataaaatctgccacatagcttcttggaactaccacatcgcattcatccatctccgttgtagacgccttaatcgcctccagaaaagcccctcttgcagaccatacactttgttttcgctcatctgtatctaccaaaaacacatcttttgccccattattgagacataaatcagccgccctgctataattatgttccacctcgtctctgccgtttccgtcaaatgtcaacaaaatgtaggcgtcactggaggtatcaggaaacttttttcccaaataatcttctgcgaaaagaatcgtcgttctttccataaattcgatggctacagcctggacctgggactctatgattttaggtacagtctcaattgcatcagaaatagtatgaaatggtatcagcagactgactgttttttgcggaagcggcaaaagttttaaaatggcttttgtgataattcccagtgttccctctgagccgattatcaaattcatcagactgtatccagaactgttttttaccaccttgcctcccagttccagaatatttcctgccgctgtaaccaacgtcagtcctctcacatagtccctggtgaccccatactttaccgcccgcattccgcctgcatttgtgctgatattgccccctatggtggctgacttctctcctggatctggcggatagaacagcccctgtccttccacatattctgccagttccatcaaaagtactcccggttcaaccgtaacggtcaagttctcacgatccagctctaaaatatgattcattcccgtggtttctatcatgataccgccatgagtggctactgctcctcccaccaaaccagtacctgcccctctcactactaccggaatgtcacggccggaagcatacttcatgatatttgctatttcctctgtactaactgcttttatgagaatctcaggcattgaaaatacatcccccaattcatcgtgcccgtagtcctcactgatttcttctccaatcagcactcgttccggcggaaacatggccttaatatcatctatacattcctgattcatccgattcttgtccatatctccccctccttcatccaattggccagctccggtaagatttcgtaccaatcaccgacgagtccataattggcaatatcaaatattggtgcttttttatccttattaatagctatgatgcagtcagatcctttcatccccgcagcaaactgaacggctccggaaatacctatggtaataatcagtttgggttttacggttcttccgctaagccctatctgttgtcttgcatcaaaccatccattctcaatcaatggtctggtactggccatctgagcccctaaccggtcagcaaacacttttataatttctaaatccgccttggttctcacgcctcttcccacagccacgatagtttccgcatctgatatatctgcctgccgtgtcttttcttcatttgaaaggacctgaacagatgcatcaaaaaaaccatcacttatctccatgtctactacagaaccactggggaactggtttcgctctgcctgagaaaacaccttatatctcactgtacagaactgcggccgatgtctgggtgtcactatctgagccataatattgccaccaaatgccggtcttatctgaaccaaatccgaattatccttcatctctaaaaccgtacagtctgctgtcagacctgtcctaaaacgcgcggccacccttggtgccaatgacctgccttcgctggtggctcccaccaatatggacgaaggcttcgcattctcaataaaatcagagaatacatttgcatatgtcataatgttaaaatcgttcagttcctgatgattgtacaggaatacccgttcgatcccataatacagcaattcctcagccttttcttttacacggtttccaataagcagacagtaaacaggagcctgtatcactgatgccagttcttttgcttttcctattaactccagtgatacaggatgaattctatctccatccatctgaatatatacagcaatccccttccatttttctttctcgacagcacaatctcccaaatcctcatcaatccactccactactccggccggcccttttttcacacatatgcggcacattctgcatccggatgatatagataatataccgttctcttccgaaatcgctccaaaagggcagagttcttctaattgttttgctatatccttcgtgactctgtcctgattgacttttattttcgccatacgtttctccttcccggtcagtagctacagaaattttttctcttgaagaatatgaatcaaatatcgggctaatttctgtccgttttcttctactatttctttatcttttttcttttctggtggaaaaatccgttctacctgggtgggagaaccatcaagcccataatgtttactgtcctgatcactaagttcctttaacgataccgtcttaagacaatccaatgacatgttcagttttctcttataagaaggcagcctgggtgtgtttgcatccttctccacagtcaaaagacacggcattttcatccgctgagtctgtattctatgttccaggttcattcgtatggtaatttcattttcacctatatcagttatatccatcacatttgcaccatggggaatccccataaattcagcgatttccggtcccacctgggctgtatccccatccgtggtctgttttccgcaaagaatgacatcaaatgtccctgccttttgtattccctgacagagcgtataactggtagcacagacatctgcgcctgcaaagcacctgtcagaaaccaacactcctgattccgctcccatataaacagcctctttcagcacttccatcgcctgcatggggcccatggtaatcacagttactcgtgcattctctttttctgccagttcaaatcccatttccagtgcaaaaaggtcatatggatttaactttgattccactccatcccttttcagcacgccggtaactgaatccacctcaacatcagcagttcccggcacctgcttaatacaaacaagaatttccataggcacacctcagcttttcaaaaaaccgttcacagattcacgtacaggcaccctgggtgaatccattttaggagataccaccacaatttttacttcccccggtccctcagctaccggaacaaaatgtagttttcccgcgtctataatcaattgtgtgccttctggaatacgcacaatctgtatagacgcctcattcaccttaccttctgaatcaaaatttgcaaagggcatcaaagctgtaccctggacaaagtaaaaaaactccttgtctttatgatattcaaactcctggaactgcggttctgccgtctgacaagacaatattcccccgctgatttgggatgactgaaaactggcaataagtggcgaagcagcccactcaaaatagttctctctgtatggctctgtttcctctctcaatactgtcactccctctattttcgtgtcttttatatctgtaaccgctatctccatcctaaactctcccttcttaattcttttcctgtaccatcttcatatccgccagagaatccgccaaatgctcattaatcgtttcctccgctgcacttacatctccgctctgtatggcttcaatgatagcgcagtgagaccggtaggccctttcaatattttcatctaacataaacaccttatttctataatcagccaggcagtctgtaatggttttttcaatgcatatcagcagtgggttcttacttaccgatgtgattttctgatgaaattcctcgtcataaagcgtcataagcacacctctgttctgcctggtgtgaccacccgccaagagttcctttgtcttttctgaaatcacgttaagatgctcaatccactttttatctccctttttcattgccatcctgacagccatcagctcaacagcattgcggacctccatataattttctatattctcgctgttctccctgaaccaatctgcaatttcacttcgctcaacctgcggcttctcctgctttctgaaaaagactccctttcctcttacggactctgttatctttaatgcctgcatcatccgataagcttccctgaccgttgacctgccgattccgcacatattgcagacctcctgctctgtaggcatacggtccccctccttcagctgattttcttcaatatattctttcagccaatcaatcgtctggtccaccacagaaattttctctatcttcattttcataggtctttccccgattctcaaatttgtttactgcctttagaatgtatgtatgaaagcctccgattaacggccccaaaccaaatgtcaacaacactgtcccggcacctatttctccgcccaggcagaacgccatggctgcgcatatcaaatccattaccagtttcacattccccagtcccagtcctttccggtgaaatgccaccaccaggtcatcggtaggtccgggaggaagatctccttccatataagccgctgcgcagaaagccactattatcattcctcccgcaaacagcagatatggatgtagtgtactaatcccgctattcaaacatatcctctgccacaggtctgtaaaaacacctaatagaaaagaagtaataaatgtggtaaatcgtggtatcctgcgccggattaccgcggtcagcaatataacacacacagaggaaatataaatccctgaagaaaccggctggcccaacagaccggccagggcaaaattccaggcatcataaccccccgcccccagcccggacataattgtcatcaccacacccacaggcatgagtataattcctatcagatacaggaccagattaacacaacagctatgtcttatccggacattcttcttcatatttcacaaacagccctgatagagttcatcagtttttcccggttttcctctgtgtcctctacaaatgccgtactgtgcaaatactcaaatatcttctggatattcttccctgtttccggaataccaagttctttaagagtaaccggcatctccatccgcttcatgaaattccgaaattccggaattttctccggcgttccattgtaatacaattggagtatcaatgaggttccgacgatttccccatgaagataggacaaggagtcattggtaaagaacattctggcacagtaatacatttcatgggcaagcgctgtctgcccaaatgctttggaaaccccactgatgacgctggtcagcgcaaaattaataaacaggaaatcatgaacctcctttgtcagccggtgttcccgaatatcatcatatacttttaaacatgtctccttaagaatatcataagtatattttgataaatagtaggccgtgtataattcaatattaaaatcattaaatggcatagaggcatgaccatgctgtacctcaataaacttcgccatggcatccagtatcccggatgcagcatatctgggaggctgatgaatcatgaccgtctcatcaatgattaccgcggatacttcgtaatcatggtaaaaattaccgcccactgtaccgtatgctgccccctcctcagtatacataacactcatgggtgtatatgccgcgcatgtggctgcctgggtcggaatattcactaccggaagctcagccatatgggcaatgctttttgctaagtccatgatcttcccgcccccgactccaaccactacatcaaagctgttttttttacaatatgcggcataatggtttgccgcctctctggtattgtaaccggggtaaaccacaaattcatgagtgacacaggcatcacacaaactcctcctcagcggctctccggcaatatcgagagccgtaggacctccaatcaccagtgcatgatgaccaaaccttccaatctcacctccggccaatttaagggcatctggttcctgtatatatcttcccgcaccaaatttaaatgccacatctaattttgtacccattttatgtaagcctccttctctaaaccttaagatatttcacagcagcccgttcaatgtaaagtccctctctgaaccttgccataaactgttcaaatcccaaatgcccttctttatccggtacctcagttaacgtccctgtgtcctggaatacatgtccgtttagatattttgcaaggcccagattatgattatcccttctgaaggatgccaggattgccattccccaggctccgccttctcccgctgtttccatcactgttacaggaacattaagtgcgtctgacatcatcttctggccaacaccctgggttttgaaaaaacctccgtgccccaacatacgcgccaggcagataccttccttttgtaccagaatatccattcccatccgaagtgtggccatagacgcatacatctgcactctcatgaaatcggacaaatgaagctcactgtccggagtcctggcaaagagcggcctcccctcctccattccggtaatatgttctcccgacagatagcaatatgacagcaggcctttacaatccgttttactctccattgccttgcgaaagagccgtccgtatagatcatcggcagttacctcgcatccgaacagttcagctgcctctctgaacatattaacccaggcatttaaatctgacgtgcaattattgcagtgcaccatggctaccggctccccttccggagttgttaccaagtccagttccgggtaaacaccggagagcggatgctccaaaaccaccatggaaaatatggatgtaccggctgatacatttccggttcccggctcaacactgttggtcgccaccattccggtgcccgcatctccttccggcggacacatgggaattccggccctgagatctccatccgggtctaaaaaagcagctccttcttctgtcaatgttcccgccggcactccagccgtccgtacctccggaagaatgtccaggaccttccatggatattttttatcagcaaccaactggtcgaagcgctctgccaggtcttttctgtaatccttttgttctgtgtctatggggaacattccggaggcctgcccgattccaattaccttttgtccggtcagcttccagtgaatatatccgtccaatgtggtcagataacgaatctggtcaacgtgtttttctccgtttaaaattgcctgatacagatgcgctatactccatcgctggggaattggaaagtgaaaaatttctgtcagtttttgggaagccgccgctgtcatggtgtttctccaagtcctgaatggtaccagaagtttttgattctggtcaaacgccatatagccatgcatcatggctgaaactcccatggcgcctatagtatgcagtgtaatatcatatttcttattcacatcctcttttaaggaccggaagcaggaaataagccccgcctgtgcatctgccagacgataagtccatattccctcttcaaaccggttttcccagtcatagctgccctgtgcaataggcttattctttccatctaccagcactgctttaattctggtagagccaaattcgattcccagagccgtatttccctgttctatcgcattccttatctgatccctgtccataccgtccatcctatctgtacattgggccatacgcctgacatgctctgtaatcctgggcttccttgtccattccgaatgcattccagcatgccggacggaatattcgctcttcttccacattgtgcatacataccggtattctcagcatagagcaaagtgtgattacatctgcgcccacatgaccataacttatagcaccatgattagctccccaatgattcatcacatcataagcgctagcaaaaatgccatgtcctgtcactctgggagcgaaccaggtacagggccatgtataatcggtcctcttccaaagctggtccgatatggattccggaagatgcacactccatccttccaccagctgcacaacagggcccactccctttaccagattcaggcgtatcatggtcatgggcatctcagcttttgtctcaaaccgtgatgaataaccacctccgcggaaataccccaaatccgcctcgcaccatgttgtagcattcagacagtttttcacatctgtctgcgtcatttcccaccaaggtttaatggctggcttcccttcattatcccgtgcttccgcacaggcatccaggcagcatgcgccggaatttatcagatgaataaaaccgccggcctctttggctttaccttccagacaatagccggttacgcgttttaccgcatcttctgaccaacaagtcctgacatccgcaaacatctgagaacaattggtgagaagcttaagaagcagcatgcttacaccgttgagtgtatcattctccgtagccagaatataaggttctctggggccgttccaatcaaaagatgtatttaaaatcgcctcaggaaaatccgtgttgggatagtggtccgtccattgcctctgtccttgaaaaccagccgcaagagcattgtgccccaatgtttcctcgcggtgttcatctgaaaatgtcgggttgccgttcattaaatccttgataataagagcgcatttcactgtaaattcccagttcttatccttcttttccctgctgtgtctggcaaattccggattcttgtccagcccctctttacagttctctctggtccagtgcagggccctttcatattcgttatgattatagatacccttatcaattctcctgagaatttccacttcatcgactgactccaccctcattcccagatattcctcaaaaaaatcagggtcaataccggaaccggatatccccatacacatggagccaatctgcaaataggattttccccgcatggatgcagctgcaatggacgctcttgcaaaacggagtagtttttccttcacatcttccgggatctcagggtcatctgcttcctgcacatgtctgccatatatcccgaaagccggaagtcctttcctggcatgggctgccaatacagaagccagatatacggcacccggacgctctgtggcattcagtccccacactcccttaattgtcatagggtccatgtccatagtctcagaaccataacaccagcacggagtgactgaaagagtgatatctactcccagctttttaaacttatgtgcgcaggccgctgcttcggcaacacgtcctatggtaccgtccgccagcactgtctgaaccggctgaccgttcgagtaccgcacgttctgctcaaacagttctttgactgctctggccatattcatggtctgctcctccagtgaccctctaacatccagcattccctgtctcgcatcaataatgggtctgattccaataattggatactcccctatatatctgttcgtatactccattctctattcctcctttaaattccaagcccatctggtattctgtacggcaaattttccgcctgttacctccaaatcaaaacctgtcatatattccgcctgttcagatgccagaaatacaatggggcctgccaggtcttctgctgcgcccagacgtcccagagacacattctgaaccagttgctccccattctcttttatattggctttgcttatttccgtatcaatcatcccgggcacaacacccaaaacgcggatatgataaggtgccagttcggctgccagtgttctggtaagactggaaactcccgacttagccgccccatatatggctcctccggcgctgggaatctttgccgcgaagctggatatattgataattacgccacgttcctgcttcatcataatgggcgccaccagacgtatgcaatcccataccgccttaaggtctgtattcatgatggtgtcccattcatcttctgtatactctaaaaatggcttatctatggcaataccggcattattaatccacacgtccacagttccgaactttcggcacaccttttccgtaaaccagcgtaccccctctttgtccgccacatccagaacttctccatagaaattgtcataccccagtccgcgcatctcccggcagaagtcatccaccttttcttccgttctcgcaaagacagctacagctgccccttccttcaggaatccccttgcagcctcttttccgattcccccggccccgccggtaatgactactgttttaccctccagacctaatctcatcgctgcctccatcatccgcccaggtatgcctttttgatctccggactatccagaagtaccgaactttttccatgattaaccacatgccctacttccagtacataagttctgttggaaattcccatagccataaaggcattctgctctgcaattacaatcggggtctttttcatctcattgatatgtataatggcccggaacatttcatccacaatgaccggagccagtcccagggaaggttcatcaaacataagaagtttaggattgctcatcatgcctcttcctatggctaacatctgctgttcgccgccgctcatggttcctgctgcctgtttagaccgttcctttagtctgggaaacaggtcgtacacttcagccacatggtctgccatctccccttttgaatactttttgctgaaagcgcccatctccagattctccagcaccgtcatctgaggaaatacctcccgtccctcaggcacatacacaattccatcataaatggatttatggggcttttggttatggattgcccttccgttatattcaatggaaccctgcgcggtgcggttgatacccacaatggttttcatcaatgtggtctttcctgctccgtttgccccaatcagggacacaatctcatcatcacccacctcaaaggaaacgttgaacaatgcctctacttttccgtaatatacgttgatattatttaccttcagcatgtgccaacacctcctccttaatatgcatgataggcttataacggtcaccaagatacgctttgattacctcatcattattctgtatttcatccggagtcccctccgcaattttcgctccgaaatttaacaccgtgatattggtacaaatattcatgactacatccatgttgtgttcaattaggaaaatgtccacccctgaatcaaaggttttgagtataatatccacaaactccttccgttctgttggattcagtccggcggccggctcatctaaaataagcgtatccggtttcagcatcaaagcccgtccaaactctgtcattttctgttttccgtaaggaaggttttttacatttacatcccggatatcctccaggcctatatattccagcacttcctctgccctttccctaagtaactgctcctcttttccagcttccctgaaatggtaaagaaacttaagaatacctaattttgtcatctgatggcctccaaccatcagattttccatgactgtcatggactggaataactttaaattctggaacgtccggcttatgcccaaacgcgctatctggtacggctgcataagggttgtacatgtattcttataatatatctccccttctgtaggtgcatatgtaccggtaatctgattaaccgtggttgtctttcctgatccgtttggcccaatcagggcgtgtatggttctttttttcatttcaagggacaaatcattcactgcaacaaggccggagaatctttttgtaatgtgatccagctttaaaattgtatcttcactcattatctattctccctcctttttgcacagatgttttatcagaccaaattttccaaacggaccagtatgggtaaacagggagacaatgccattgggcaggaaaatcgcaaacaacagggcgattacactgaataccaaccagtaataactttccatgaaacgcaggaactccggcaaaatcgtgataaccgcaccgccaatcacatttcctcccacggtaccgatacctccaatcatcatcatagcaagatagttagccgataaatcctgaacaaaggtggttgggttgatatatcccatcatatgtgtatacatggctcccccaaaacatcccaatatggtggccagggtaaacgcaagtatcttcatctcagcaatattgataccgctggcctcaaccgcctccacattgtcccgtatcgccttaaataccctcccccatttggaatgaacgattcggtatgccatgatagtgatgactattacaatagctagataaaaataatagattctgaaggatgtatttagctctattccaaaaagattaatccacggtatgttttgtacgcccattgttcccccggtcaaccccacccaattcgtaagaataagccgggttatctcgctgaaaccaatggtagtaagggaaagatatacgccttttaagcgcagactgggatatcccagaccctttccaatcaggatacccattacgatggcaactataaaccccaccacaaccggcatatgaaatttagcgctgcataaggcagcagagtaagctcccagtgccataattccagccgtacccatattcatctgtccggtcagtccggttataaaattcaatccggtaaccaccacaatattgaccagcgtctggcacagtacgatgtgatggtaggtattcttgtcaacaatcggaatgaggaccagcaggaagattccaaaaagaattcctattatctttgtcgatttattcatgtgtacctccatcatttttttctgtgtcccagaagaccggtaggccgtataaggagacatgcgattaaaagtacaaaagctacacagtctttatacagtgtgggaatcacaagtgtgctcagattctccagtattcctattaccacgcctcccaaaatcgctcccggtaaatatccaaaaccgccaaacacgccggccgcaaatccctttagtccaatcatgttagctatggttaaatccacagtaaataaaggaatcaccataatgcctatgactgcacagattgccgcactgagggcaattgttaaatttatatttctggtgacgttaattcccatcaaggtggccgctgtcttgttctgctgtacgcatctcatggcctttcctgttttcgtgaaattaaaaaacaactgtaaaagaatgacaattgctatggagactacaataacagtgatgtttgctaccgtaatcacaatatccccaagctttaccgttccttttaaaaaaccgggaactgtaaaaggggtggctccccagataattctggccagttcattgagaatccttcccaaaaacaccgtacccataacagcaaagattggggacgtcatattacgaagaggattaaagatcccggtggccaccagaacaccaaatataaacatggtaagaaccgtggccaggactcctgccaccggattagttcccatcctcataaggaattgagctgcaaagatataagcacccagcataatgaatttatcatggctgaaatttaacagaccagtagaattgaaaatcaatgtatactcaattgccaccagcgcataaataaatccaagagcaagaccgcttacaataagctggataataatgctgtaagtcattggcgacctcccatctcttagtttaaaatggatgcaaaccgcattcctgtctgcatccatttttcaacgactgctactctaccgtcacataatctaccatgccaggaatcttctccttaatctgcgcaataacacagccatggaccatatttccttcttcatcacatgagaacactccttccggaagttttatatcctttgtttccgccagagcatccctgacagcctgaggttcggttgacccggctctttctattgcgtctgccagtacataagccgcgctataatatgtagatgcataaagttcaggagcatatccatattttgctttaaaatcctccacgaattgctttacagtgtcgtcatcattcgttgagacaaaatcagttacagcataccatccttccacatactccggctccagcagatttaacacctggtccataacaacacctgcggaagcaattaccgggacatcaaatccgagttcatacagctgcctggcggttaatgccacctcagcatcatctgtccatgaaataatacagtcaacgcctgcactctttagctgcatcatctgtcctgttaaatccttatcgcctgcattatgtccgactgccacatactcgatgccgtctgcttccaatattggaatgataacatctcttccgccggttccaaagtcattattattgtaggaaattccaatcttcttagctccaagcgtatcaattgcatatcttgctgccacctgtccgttgattgtgtccgaaggccttactcggaagaaataagggttatccaattccgctaatttggggctggaaccgccagtcataaatggtatctgggcatttttatacaaatcactggtagctgctgcatttccggaggtatgtggtccaatcacggcacatacgttctcatttaataatctggttactacatttaccgccgttgtctgcgtattttgatcgtcctccgctacatataccagtttcttgcccaaaacgcctccattggcattaatctgctccaaggccaggtcaattccctccttcgttctctgacctgccaacggaaagttgccagtaattgcgcagctgacaccaaacgtaatttccccatccaattctgctgatgtctcagtgttttccttttcagagctgcctgcctccgtcttttcttcctgcgtctgtcctgaatcagtcgatgcagatgcatttgttcctcctgttgttcctccccctgagcatgctgtcaaccccagaatcatgactgccgccaaacttactgcccatcgttttttcatcataccaaaatacccttcctttcatcattcgttggttatccgtttactttaattccaatggaacccatagtgtccaccagaatttttctctcctcctcagtaataggcgccagaggccctctgcacggtccgatcggaatgcctgttaccatctcaatcgccggtctcataatcgaattcggaagaattcttccattctgtccgcatgctttacaaaatctgtaaagcggtacgaacagttcctttgccttatcatgatccccctccgcaaatgcttttaaaattgtacggatttcatgtccaaagatatgggcccctccgcttacaacacccatggctccctggactaccgtgggaagaagcatgatatcatctccgttaaagattacgaattccgaattaatatcttctgttgctaatataaagtccgtaatctgtgtggggttaatgcctgcctcatctttgattccgatgatattctcaatttttgaaagctctcttaccgttggggcatccacgtttacacccacgaaaatcggaatattataaaggaggatattaatatgtacgctattggcaactgccttgtaatggttatagatgccatcctgggtaggcttgttataatagggggcaaccaccatacagagctcaatgcctaaatcctcagcctttctcgtaagagcaatcgtttcctttgtagaggcgcatcctgtaccggctataacaggtttcctgccagccgaagccttaagagctgtttccattaatctgactctttcatcaaatgtaagcagggatgcctctcccgttgttcctgtcacgattaatgaatcacaaaggtcattttgaatcaaatattcgattaagtcttcataggccttgtaattaacctcttcattggtatcatacggtgttaccagggggcataaaatctgtccatacttctgcgtaaactcatttcttgtcatttgatgttctcctttgcacttttaatattggtctaatcttatatgttttgcggttatcatgttgtctgataacatgataactattttttcataatatgtcaatagatttttatattacagtatatttttatgcattatgtatatgataccgacgtttttttagagaaaacagcattttcctaattccatgcattttacaattgacatgttgtctgataacatgatatgctatatttaatacaactatttaattagtgccatatacattcatatacgctccgctggccccgctatcctaatgaaaaagccaggtcgatgtcagatatactggaactattgcattttacagaaatataaatatcccccccatttcggtaatagcacttgtaaattctggtaaacgttgataaaatataaaccaaccggcacgggaatgactgagagaatataagcaaagaaggggaaacgaatgaataaacctctgaaaagtattgcaaggatttctgttgtggatcaggcaattcagaatctccaaaattacataacggataataatttgcagccaggtgacaaactgcctacagaaaaagaagtctgtgaaatgatgggaataggccgctccactgcccgagaagcttaccgaatgttaaaagcaatggattatgtaactgcgattcagggaaagggcatttttttaagtgacaagtacagaaaaaatgattccaatgagatggcgcttgaatggtttcgtgaaaatggcagaagtatgattgagttcatggaagtgcggatggccatagaacctatggctgtacgtctggctattccaagggcaacggattccgatattgaggcattagaaaaaacgcattttcttttccaacaggctcttaatgacaaaaacacagtcaaactgctctcctatgatgaacttttccacaatcaaattatggaatttactgataatcagctgatgattcgtattagtcagaatatcactgaatgcttccgcagttaccgctccaaagcctttgctgtggataaaattatgggaaatgcagttacgccgcatgcaaaaattatagatgctttccataaacgcgatacccagcttggttataatctcatgattgagcacctggagatttctctggaggatatactgaaatattcgacaccttaaatatccatttccaacaattgaccgctgtaccccatctttggaggaatacagcggttttattttctcacctttgcacgataatcacatttccggcactacgtcagctgcaactccctatcttccctatgatacgcgcccggccaactgcagatatcctgctggttcccaacgagatgattagatgcatccgcattaaagtatcgttaatattcctcccatcccgttgacattgtccctttatcctcatataattccagcaggacaggatatttccatatacaaaacatcagaagggaaatgacatacatatggacgccaccgtcaacgacgatgaccaaattttcacccaaaaaccacgcttcatatgtttaaaagaaaaggcatgacccgcattcatacacatggatgcgggcaatgcctttttcttttgaaataatactgccaaacagataaaagaggaggaatcattgtgagtattcattcgtttttcagtctattaggaggactggcattatttttgtacggcatgcagatgatgagcaccaatctggaagccgcagccggaagccgcatgaagcagattctggagcggctgactgccaaccggtttttaggcgtgttcgtgggagccggaatcactgctatcatccagtcctcatccgccacaaccgtcatggtggtgggcttcgtcaactcccagctcatgacgctcaaacaggctgtctggatcatcatgggcgccaatatcgggaccaccgtgaccggccagctcatagccctggacatcggggccatcgcgccgttgattgcatttgcaggtgttgccctgattctttttgtcaaacagaaaaaggtccagtttgccggtggtattattgcaggtctgggtatcctctttctcggcatgggaatgatgagcgcggcaatgataccgctgcgcgattcccagcattttgtcaatttgatgacaaagttttccaatccctttctgggtattctggccggagcagcttttactgctatcatacagtcctcttctgcatctgttggtatccttcaggctttggctgtaagcggattaatcggactggacagcgctgtctttgtcctgttcggccagaatatcggcacctgcatcacggcagtcctggcctctatcggggcaaaccgcgacgcgaaacggaccaccctgattcacctgatattcaatgtcattggcacaactgtgtttaccctgatctgcctggtgtccccctttacacagtggatggcctcgttcacaccggacaatcccgcggcgcagattgccaatgtacatacactgtttaacattatcacaaccctgcttctgttgcctttcggcacacagcttgcgcggatatccgaaaagcttctgcctgataagccgcagaaaacaacggatgaggagcgctggtttgaggatttgctggcctccgaacatgtacttggcgtatcagtcatagcaaggaagcagctgaatgaggacatcagccggatgcttgctctggcggcctccaatgttgaaaccagttttctggcttttgagcacagggatgaatacgaattggagcagattcaaaaacgtgaggaagagattgatctttacaatgcccagttatccagaaggatttccagggtccttgcagtggaaaattccccgtctgaagtaaatgcgcttaaccgcatgttctccatcatcggaaatgtggagcgcatcggcgaccatgcaacaaatattgccggctatgcccggaccatgatggagcgcaggctggagctttcttcccaggcatcggttgaactggccgatatgaggacctcctgcatgcgcgccgtaaacctgatttgcagcgcctgctgcgttgatttcacttttgctccagagcaggaatctccagataaacgcggctctctgacggaacatgacgctccggcagaacatatatccttaccgcagcacgcctcccttctggaacaggccctgctgctggaacaagacattgacagccggaccgcccggtaccgctccaaccagattgaacgcatgcgaaaggggaaatgccatgtggagacttccatcctgtattcggaaatcctgaccgattatgagcgcattggcgaccatgcgttcaacattgcccaggcacttgacaagctggatgaaaattaacatgcagattcgtttcccgcagcatcactaagctttcggcagcaatgcctgcttcttccggcgttttttatgttcctgaagataaaatgattgaacgcaggacaacgaacaaagtcattgtaagaaaacgtattgctatgctataatcaaagcatccgtatagggcgggggcagttcataccatcaggtataaaagtcaatcagaatataactggttagaactggaatagtaagcctatacacacttaaaatgtgtgcatgggcttttatattttgcagaaaggcgttacaaacaatgatcagcatagtaactacatctattgtttcatttatcagtaccaacatagataatatttttgtcatgatggtgctctatgccaaggttgacgaaacttttaaaaagaaatatgttgtcattgggcaatatcttgctattggcatactgacagcaataagcctgtcagccgctttcggcctcaactttgttccgcaaaaatacgtcggtctgctcggttttataccgattgctttaggcgtcaaagaatggatatcatacaaaagacctgcccaaaacaaatccaatcgtaaagaatttccgttggaaacagaaaaaaccgaagctgcccaccccaacaagctgcagaatatattgcggaatgtaacatctatggccagtaaaatcgtaaagcctgaaattttaagcgttgctctcgtaggcgtggcaaatggagctgataatattggcgtttatattccattgtttactggctattcatcaatacaggtcattataactatcatagtgtttgttttaatgatggcggtttggtgcttcctgggagaaaagataaccgatttgcccaagataaaagcaatcattcaaacgtataagtattttgccgtaccggctgtctttgttggacttggtatatacatcattatcaaaagcgggttaataacgtgatataaacagctttatacctgattgtaaaataacggctccgcatccgtatagataaaaaaaatagccggctgtttccttatagaaaaaataaatgccgggcctgcaaaggggcaaaagcgtttgcatacattttcaaacctgctataattagagacatgtgatgataatttcaaagcacacttccgggaataggaagaatcagatacatgtttaaggaggatacgaacaatgaaattagatgaacgcggaaaacagtgccctaagcctgtcattgacactaagaaagcgttggaatcctgcaatccgggggagacggttgaggtattggtagacaatgagattgcggtccagaacctgagcaagatggctgccagcaaaggcctttcagctgtttccgagaaaataagcgacaatgaattttccgtaaaaataccagttggccaggaagtaacccctgcttccggagcgccggatgattcggatgaggaaccggcggcctgcctgcctgacagccgcaaaaagggcatggcagtggttctgtcctccaaccttatgggccacggtgaccctgaacttggaaaggctctcatgaaagggtttgtctacgcccttacacagcaggatgtcctgccggaaaccattcttctgtataacagtggcgcctatctttcctgcgaaggctctgataacctggaggatttaaaatccatggaatcccagggcgtggagattctcacctgcggaacctgcctgaatttttatggattgagcgagaagcttcaggtcggcagcgtcaccaatatgtatgagattgtggaacgcatgacagccgccaaacttttggtgcgtccttaagctttcctgacagctggactgacaaaaagattataataccgcaaaaggacccctacatctcatttcagggtcctttttcatatgcttacctgctcagacctgattcatacctgttcaaggcatcctcagacatccgccaggattccggtcacactcagccaactccgataaatattgtccttaaacaccgccccatccctgatgagcggcagattgcatatacacctcccgtctgctgtccgggactccgttccatctctcattgcacctctcatagcacctctcattccggctttcatcccagctttgattccggctttccatcccccgttcatctcatcctcctccattctcagatatcctgtctccaggtcctggtccgacacacacaggcctttcacattatccgcaaacaattccggatgcataagataagccgctgccgtcacatcccagttatagaaaccgtgaatgccgtagccctcatcattatatctgaaccaatcatctgttttttccataatatacgctgccgccctgttttccgttcccgataaccgttccctgtattcctgttttgtaaataaaactttaaggcagttgttgcctgttatcacggaaacattccggccctttgtgaggacggtcctggcagccggcgggtcacaggaaaaattcagttcctccatcaccttcttttcaaatacaagggggcttgtgattccgcccattaagacaatttcttttaccttttcaaagaaatgactgtccctctcatatgcgcctttcaggtttgtcagggaacccgtggcaagaatcgacagctcccccggatggcggtccgccatttccgccagaaagacggcagcctcgctctggtaacagcccctcttctccccgcctctttttacaggaatatccctgcgccccaattcttccagcatccgcagattcactgcctgcaccacatccaggctgctgtttccataggtggacgtaatccccagaagttgggcctccctgcttcccagcaaatacatcagggccagcccgtcatccacatcgcagtcctttactccaaaggtattgtcacagtcaaatatgattttcttcatctgcatctcctcccgtccatgttttcccggtacagtccccgcctggacacagtccccgcctgggcacagtccccgccacagcacataacctgccaccacataccgtttccggccccatttccctcattccatatcatgcctgaacagcactgccccttccgtttccacggccagtccggccttcatacctgcccgtaattttgccggccggccggggccttccattctctggcacaggatgcttccgccgggagccattttctcaggcaccctcacccttatctctgtcatctcccccatgaaggtaacttcctccacggtatgatcgccctcctctttcagctgcactgagttcggacgaatcatggcatcatagaccccatccggcaaatccgttcttttttcaaacaaagggctgacaaaccagcctcctgccactgacccggaaatataatttacctttccaaagtactctgccaccttttttgttcccggatggcagaacatctgctccggtgttccgtactgaagaatcttcccatcctccatcaatgctatgcggtcggacaagcgaagggcctcagccttgtcgtgagtgacgagaatagttgtgattttccacgcctcatgaagttttcttaccagccgcgccatctctgtcctcagcccctcgtccaggccggaaaagggttcgtccagaagcagcaccctgggttctgctgccaaagccctggccagggctactctctgcatctggccccctgacatctccttcatccttctcttctcaaatccgggaagctgaaccgcccgcagcagtgcctccacccgctccttctgctctttcttcggcacctttctgagttccatgggaaaggcaatatttttctccgccgtcatatggggaaacagccgcaaatcctgaaacacgattaccgttcccctctcttttggctgctggtccatcacagatgctccctgtatccgtatatccccgctctcctgctccaaaagacctgctatgcattttaacagtgtggtctttccgcagccggattttcccaagagagatacaaactctccctcctgtatttccaggtcgattccatgcagtatcttctttttctgaagggataccctcagattttctatgttaagactcataatatcctccaactatctgtcctgtccaataccccgcaatccgttcaaacacagcaaataccagaagggtgatgcccatgaacaaaatgctgtaaatacaggcaatattccggctgccgctctgtaagtagggaaccatcacaaccgcaaaggtctttaccctgccgcctccaagaagcagtgtcagaaaatactggctgaaggatacaatgtatgacatgctgactgccgacagtatcaccggaaccagcattggcagtgtggtccttctgaacgcctgaaaggaaccggcccccagcacccaggcctgctcctccagcgcaatgcccactgcccgggtgccgtccataatgaggcacaccgcgtagggcagggaataaatcaggtgtgccagaatgacccccgccactgtattgttaagtcccaaccggataaacgtaatctgtatccccatggcaaacacagtcccaggtaccatgagaggaagcacggtaaaaaatgacatcaaatccttccccctgaaccggtacaggacaagggccctggatgtcagtatcccgatgacggccgacaggacggccaccacagaagaaatcatgacgctggatgccatgagtgagaccagttctccctttcttctgacaatttccatggctgcccggtccgagagcacctggggaaacagatctggccaggcccaccgttccgtaaatacccatacaaccagactggccgcgggaatcagaatggatgcacacagcagggccagaatcatatttgtgataaacgattttctcttcttcatctccatccgctccatcttctactgctctgtcagtgccttcatatttttacgcatgatgaaataatacatccaggcgctgagcacggagagaacgataatgattccatttaacgccatggaataaggccggtttctcaaatccggatggatatactgctggtatgccagcaccggaagggcctttggggaggttgcgcccaggagaaagggaagctcataggcacccagggcaaatacaaatataatcaggaacccgctgattaccgcatccttacaaaggggcagggtgattttacaaaaagcagtccaccggcccgcccccaggtttatggctgcctcccccagtttctcattgatatttgccatcaaagcaataacaaaataaattataaagggaatctccttccacagatatgccaggatgactcccactccctttgtgtcataaatgagcataggaaactgctgctgttcctgtaatactccaagggcgtaaccgattctggccagcaaaccattctgagaaaagatgttgaccataaaaatggctaccaccacatggggaacaatgatgggaagctgtatcacccgcatcatgggcccctttgtccttttgtgcatcacacacacagcacttaaacccacacctgccgcagtggcaacacccgcagacagaaatgccaccttaaggctgtacagcacggactttagcatatccggcctggccagcacttcccggtagtattttaaggttggttccctcaatccaaaagctggaattaccccaagactttgggtaattccagttgtcaatcctatgataaaaaacagggttaatatgatttgggggaccagaagtaagtacggaatcagatttcttctcatttttttccttctcatatctttcccaccactccgttcccacccattctgttccctctccatccgtcccctcttatgctgttcccttgcattacgttcccttccactccgattccacccatccgattctcccccgttatttacccactacttcctcaacccagatttcctcgataatgggaaccagctgtgcgggcatttcgggaaggcgtttagagagaagttcatcctgggggattgtacctttacccagatccaccctgtcaaaggccgctttctgctcaccggacagcttttcgttgtccagaaccggaatgaccctcagcttttcatagcggtctgcctggatctccggcgatatcatctcattaattgccaccatagccccggccttattgccggaattagccgcaattgccataaaattggtattaccgatggttcccttttcaaactggaaggctgccgtggtatctgtatattttccgtcctcaatgttcagagccacgtcataggctccgtacgtcatgctcatcaccagttccccgtccgcaaacatgttgtccgcggtagtggaggaatccgggaaggcagcgccctgattccaaaggtatggattcagctcccttaagtactccatggccggcgccactgccgcccggacagtttccttatcagccgccatatccataaactgctcgtagccgcagatttcatagataatatttctcacaaacgcgctgcccgtaaaatcaggaagcgcgggatatgtcaccttgcccggatatttttccacgaattcctttagctctccgacgctctttggcacatccggcgtcactgccaggtctgccaccatgaccagctgggccttaccgtagggcgcctcatacccttcgatgggataagcaaagtccatggtcacgtcctcgctttccccatccacatagtcactaaaattgggaagcttgtctgtaaaggggccgtacagcatattgtttttctttgccgactggaagttctccccgttaatccaaatcatatcaatacttccgtccttctctcccgcttgaatctccccggtgagctggcttaaaacctggtcgatatccatggggacacgttccattgtgatatcgtatttttccttcatgacccgcgcaaattcatcgtccagccaacggttcagtttttcatccccgccccagccgtagaaggtgaccgttgttccctttgcctcctccttcatctggtcaaaggtcatattctccagtccggaccggcggctgtctgtatccccggcctggctgcttccggcatcctcagcctgactgcttccggcgccctgtgtctgtccgctgcccgaacacgctccaagggacaacgtcattgcggcagccagtaccgctgccatgattcttttcttcatactttctcctccgctgttttccttaaaaataataaccctgtctgatgaatctatgattccccctgccgtaatcttatgcagtacggacaggagaaatcacatcaccggaagggttatcctattctgtcacaaatgcagcctggatatccttatcctttgcgccattttcaatgataaacagattatcaacatcgaatccggcatccttcataacggaaataccagttttggcacacttgttgccgctgtagcaaagcaggtatacaggtttggacggatccatctcctcctttgccatcttgtacatggcagtctgtgcggtcgggtcctcgatttcctttaaggagctctggagggatccctttaaatggccttctgcatatgtatcattgtctcggacatccaggatttgaacatcgcttccacccactgcctttaaggcatctgccgccgcaaccgtcttccagtcaatatcctcctcagcgcggttggtggtaagggcgcctttctcagactccagggctttggcaccgccctccacagtataaatcagggaaccgtcaatgccggcctccttaagaacaccggttgccttctcagcgcctctcttgccgctgttgcagatgatatagattttctgtccgtcgcttaagttctcctttgcatatgtacccatggcctctgccagtgagtcatcctccagcgggaaaatagggcaccacatggaatcagccactcttcccttcacatagttatcccattcccttacatccagcacatgggcgctcttatcttttgctgccgccacagcctcctttggggatacatactgataactgccatctgactgtgctgccgccgctgtctcacttcctgccccatccgctcctgttgtatctggggctgctgtgtccgccgctgtggtgtctgcggctgcggtatctgccgccgtactctcagccgtttcctgggctgttgtttcatttcctgctttctggccgcatccggccgccactgtcatggacagcgccatcataattcctaatgttacgaatttctttttcatttcttcctccttgtttttccttgtttttctatatatattttccttaccatgacaacaaaggcagataaggcaaataatatcattaagccggcggcaaacatggccacgattttgttcatcatattttttacagatggtatgcacacatagctcagtatggacatggctatgcatgcggccaccacggttttccatatccattcactctgttttttctctatttatattcctttcctacagcctgtccattttctctaaaaattccatgtccagatactgccccagcttttggaacgtggactggttaaacagcagcttatccggctgctggtactgcacccaggccatggcgcaccaggtaatgccgcgcaggcaggtgatgggaatataggcaagggtacgctccatcagcccctttgtgtcaaatctgccgtccaccttctggatatacagatgtatgaagtcctccatctcctccggggtcagaatcacatctgttttccagaaggtggtggttggagcaagaaaatggcccagatcctgggcaggctccccatagacaggcttctcccagtccaccaggtagtttccctttccctctccgttgatgagaaaattggtggaattaagctccgtgttgatgcagcattcatagcctttgcaggcagctgcttcccggcagctcttccagccccggtccagcatctgtcttattttcattttgatatcccggtcccccaggtatgaatccatgtatgtcctgaccatggcctcgcattctattaggattgcctccaagggatcccccggcctgaccagatggctgccgcttcccaccctgacactgtggatatccgccagacactccgctccaaaggacagctctgtcctgtaatccatggcgtgacccggcaggaattccattaccatgattccatgaggaattttctccagactcccgtccgcataaaaaggccgcggtgtcctgcccgactgcctcagcagctttaatgtttcatattcgtactgtatctgatgttccaaatgcatctggctgccgcagtttacccggagcaccagctttcttccggtaacagggtggataaacagataattcctgttgtactccccctgagccagcatatggtattcctccgtcacctggtccggcagtcccagcgcgctgcggtactgcttccaggccacatattcctttaacccggctatccgttccatttcatctcacctcacatcccggtacatccggtcaatctgttcaatgggcacccgatcccggtacatcttacgcaaccggttcattttccacatcagcttaagcttgggcagggttccttttggaaaacgtctgtccgatgtgtagatgcgccgccctgtcatgcccagctttactcccctctccttaagagtcagggaaaactggtaatcctccatcacaggaatctccgggaacatgcctgcatcaaaaaacaggctgcggtccacaaagatgccctggtccccaaacatgatcctgcggtccttaatccggtggtttgatattacacggcaggtaaacatgaagaaattggacgaatgaaaggcaattccaaagcatcccgcgctgtggtccttcatcaccctgcgtatctcggccagcgggcggggaggcagttcactgtcgcagtggaggaaaaacaggatgtccccatggctttccatggctcccgtattcatctgcctggcccgtcccttttccgaatgaatgactttaacccaggggcgaatccgttccatggtcctgtccgtgctgccgccgtctacaaacagtatttcacattttcccctcagcggctccagctggtcctgcatctgaacaatggtcttctcctcattataaacaggtacaatgatggaaatgcggctggttttggccagataccgtcccgtggacgtctcctgcagcctcttatcctcccgcattctctgccggtatccctgaagatcctggtaaacgtccatatcccacagggtttcggttaatcctaccctgcagccagccgtcttaagccggtacatggtatcccgaagcacggagccctgtccatacccttccacatcaaacacgtcccgctgcggtttcttcatacccaccagataataccccccatccctggtaggccctattaccacatcgttttgctcaagcaggccaaacgcccgttccagatactccgatctcacttcaggtacatcggttcccatgaggatgcatgcctcataaccccggcccagcacctcccggatggcctgatacatccgttctcccaggccgctgcctctctgggaaatgtaatgctcccctctgccaaaaaccggatataaacgttctctgccctcatccggtgtaaagcatacaaaaagctgtccctccaccttcccacattccctttttatatcttccaggaaacaggtgtggaggcgggcgcagcccttggcgctgagcgcaggcatcatcctggtctttgtctgtccgggttcagggacccttgtaaaaataataatcgcgcgtttcatctatacgattctctccattttctgtcttgtcaaaccttcaccaaaactttgtaagcatcctgttgaccattgatttccccatatccggcttctcatcacattccggaatcccaggcatattccccagaaacaggcacagccgctgcacccgctgttttctctccctgtcaggtcatggaaggaacagcgccccgctgccttcctgccggcaccccagcattcccatccatgttttgaaacactgtatcagagacaccgcccccaatattgcgctgatgaaataatatgcccgaaattcatttgttgaattcatccatgtaaataccgcatatccagatgtcagaagcaccataccggcgctcataacccgcagcgcttttgtcaggttccttctccggcgcaggaaacagagaagaagcatggcggtcaggaggaccatcacaagcgcggccccttttgccagcagttccatgggatatctggactcccatcccctgtttttatatacaacataccgggccattcccatttttgtgcgggtaaagaactgtacggcccaggcccctgccaggcacaggatttccagaattgtcgcagatatatatgccgctttcttcattatcattttcccttttacatttaataagcgttggctcaatcaagacgcaacgcttatttttatcagtctttatttttttgctttgtctgtggacagctcacccaccgtggtaaactggcagctgctttctgcgggatcccccacctgtaccggaagagaatcatccatctgccattggtaccaccctccgtcatatacggtcatattggtcattccgttttcatagcaaatcaggaacggaatagtagccctccatcctgtgccgcaataaaaggacagctcattgtcaagggaagcgccagattcctccagatagcccttcaatacatccaggcctgctgtggttccgtcctcattatgataggaaccgtcatccgtatcatgtccccatacagcaccttccggttcgcctgccctgtcaatatatccgtatccgcttgttccgcccaggaactcgtccctgctgcggatgctgaccagcttaaagttatcgtctcctgccagcttgtccttaacctcgtcaatggacaggatgtattcaggatgaaccgggatatccgcgccaaactccctgtcagagggctgcggggtattaacggttttctctgttccgtatccgctcttaagccaggcttcataaccgccgtccaggcattttacattctccacccctgcccataaaagggtaaatgccacgcggtcgtccgctgaattcgtgcccttatcactgtagcagataaccgttgtatcttttgtgattccgtattcagccatcagatcctttatctcttccggagtccggatattccagtactcctccgattcaatatcatccgtattcatatggtaggcgcctttaatgtggccttccttataagccgccgcatcctggactgtaccccaggcacattccagaaccatataatcctctgattcctcctgattgccgtccagaacgctctgaacccagtccggcgacacatagaccttcttcttttcaaccggatctgcctttaccgcagatgcttctgcggccgtcccgcctgcttctgactttgccgcagccgtatcagcggttgtctcagatgccttgccggcagccgtgccggtatcagactcatccgcggcccttgacacatccgtacctgaggaacatcctgctgccaataatgcggcggcgcaaatcgcaatgcctaaccatcttcttttcataatccttctccactcccaaatttataatgatgtatctgttatgctgcacattctatattaccttgataattataaaaacacctgcttgttttgtccaatcggtgaaatatatgtatggaatgttatgtatagtttttttctatatcaaacttcatgattgctgttccgctatattctattacttcccaatataaacggattttataataacataaaaaaccgtcctttcccgtaccgcaaaaatcccctggcccgtactccaaaccagaggattttattaacacatataatttcagcatatcaggaagatgctccgtcctccctctgcatccttctaaaaatacgggccagcataataacagatgcaatggaaagcaccagctccgccaccagctgggcataggaaagaccgtacagcgggaacaggaggtttaacaggtacagggccggaatctccagcacgattttacgcagtatggcaaagctcagtgctgcctttcccatgcccactgcctgaaatacccctactgccagaaaatccatgcacaggaacggaagtcccaggcagaacccccggaggaaccttgtgccgtaagccacaatcgcttcattgtccataaacgcccttgtaagcaagcccgccccggcaaaataccccagggataccaccaccagaaacggcagcagggtcttgatggtaaagaatatggtttccttcattctcctgtggttgccgctggcatagttgtagctgataaggggcatgattccctgggaaaagcccatggctacctgcaggggaaccatgttgattttctgggtaatgcccatggcagccactgcctgggcgccgtaggaggatgtaaaattgttcagtatggtcatacctgtcacattcagaagattctggattgccgccggtatgcccacggcgcacactcccagcacaatgtacttctgaagcgaaaacttctctggattgatacagacaaaggttgttttccttctgacccggagcagcacaaaaaaatagacacaggcaacgcagttggaaagaaacgtggcaaggccggctcccgccgctcccatatcaaacccccacggcagaataaagataggatccaaaatgatattcaacagacagccgctcatggttccgatgctggcatgaagggatgaaccttcagctcggaccatgtatgccattaccacattcaggatagccggagcagctccaaagagcacagtccatttcagatatccggccgttgcatccattgtgttggcatccgcccccagaagaatcagcagaggattcaggccaaccgtgcacagaactgaaaaaagaaggccgaaaaacagggcgcagtaaaacccgaacgcgctgctgcgccggaccgactcataatcccggcgccccaatgcccggctcatcatgctggagcttcccacgccgaacaggttgttgaccgcattgaaggccaggagtacaggcgccgccagcgtcaccgcggcattctgcacagggttgttcatcatccccacaaagtatgtatccgccaggttgtaaatcaccatgaccagcgagctcaggatagtgggtactgccagctgcatcacggcctttggaactggtgtcttttcgaataaaatggtcttgtcatccatcatatgtaaattgcctccttgccccgcacagacagactgtgcaggcttcttttgattctaccacgggaaggattacaaaacaagctcttcatctcccttcaaaccggtcctggcaatgcggcaagaccgccgccttcgccctccggggaaattttcaacacaaaattccaacgcaaaaggcgggtccggccactgccggtacccgccctcctgttttatcggttgataggacgccaattccgccttccgtcttcaaatcccactctgtatccttcgttaaaacctgcgcggtaagcctggcgcctctcgcctgcacacgggtcccataccggccaccagttattatcccagtcattctggttggagccccagcacctgcagcatctgcagcaccggcagcatctgcagttgccaccgcagccattaccgcagttaccaccacagttattaccgcaattattgccacaattacaacatctacaacacctacagcagcatctattacaacacatatcaaaacctcctctaataaatatgattatggtatattgtatgggacaggtggacaatgtgttactctttccaagggcttctcctttttgtgtacttgctgtgtaaatatttacaaacccctttcaatggactatacttattttggaacatcgtgggtaacatcttatgaaacgggggaaggggtcgtgtctgaaatcaaggataagtattccgtgggggaagctgccagactgagcaatgtgagcacaaaaacactgcggtattacgatgaaattcagcttatcaaacctgatattgatgagaacaataattaccgttattatacaaaagaccagattcaggatattatcaccacaaaaaaattaaagaatgcaggcttgaaattaaatgaaatccgggattacctgcaaaagaaccagagacaggataaggtcaaattgctcaaccgaaagattgaggactgctccagggagcttacgcgcctgcgcaaaagcatactgcgcctcagcgatttccgcgaccgtctgtcagaccagttttatgataatctgtcctccactgccggacaggtgaaacgtgaaatctattctcccggactcattgccttttccaatcattacagcagcgcctatgtcagcaacctctttctggagtatgaaatagagctggaaaattatatggacacgcgccacctggagattgccggtaaactgactgcattcttttatgaccatttcagccaccagttttttgatattcccacccactttcagattttttatcctattaaagaaacccaggtcagagacagccaaatcaaggtcatgccggaatacccgtgtctcaccaccatacaccttggcagctataaggaaatcatggaggcctaccaccggactctggcctatgcaaagaaaaacggaatcatattgacaggccagtcttttgaaagctatttcatcggacccaatctgattaaaaacgcagatgagtttgtcacaaaaattcacatggtcatctgccaaaatccatagcgctttgtttttctgcaaccttccccttaagaggaaggtttttctttttcaattcggttttatttcaaaatatttcttgacaatcccttatagagcataccttataatgacattagttaatttttaaacatattatcagattattaatccataaagaaaggagattacttaaatcatcagcagcggattaagtacataaataatatgaaaaaaataggatttatcgtaaatcctgtggctggtatcggaggaaaagtaggattaaagggttcggacggaacacagaccctgaaaaaagccctggagcttggcgctgttcctgaagcaggcacaaaggctctgggcaccatgaagcttttaaagccaatggaacaacagctggaaatccatacctgcccaggcaatatgggtgaggacatctgcaaacaggccgggttaaactaccgcttagctgaggggaccaaagcctggagccagtgctccccctcttcccggaacactacccccaaagacaccatggacgctgccgtaatgctctgcaatgaaggagtggacctgattctgtttgccggcggcgacggaaccgcgcgcaacatcctggatgcagtgggaacctctattccggtcctgggcatcccggcgggatgtaagatacattctgcagtctatgcccgcacccccagggcagccggcgaactgatggtccggtatgcagagggcagggtcatggaatacagggaagcagaagtcatggatattgacgaaaatctgttccgccagggcatctgcgacgccaggctgtacggatacctgaaggtccccaatgaaaagaaatttgtccagaatttaaaaagcggcaggggctgctcagaggacgcgtccatccagtccatgtgcatgtacgtcagccggctcatagaacaggagccggaatatctctacattgtgggtaccggatccaccacggcccggctgatgaattatatgggtaagcccaacaccctgttaggggtggatctgcttttccagggccaggtcataggctcagactgcacggagcaggatatcctggcagcgcttaagacgtatcccagggccaaaatcatagtcactgtgattggaggacagggatatattttcggcaggggaaaccagcagatctccgccgaagtcatacgcagggtggggacgaaaaacatcatggtcattgcctccagggacaaaatcttttctctgggcggaaaccctcttctgattgacacgggcgacgaggaggtaaaccgcatgctcaccggttatatcccggtcaccaccgggtacaaggacgtaatcatggcaaacgtaatttattaaatccacaaataaaatcaaaaatcaggaggtaagaaatggacagcaaaaaaacagtatacccctacatccctaactccgcgccggatgtacaggctgagatgatggctgaggtgggaatcagtgatgtaatggagctctacgaagaaataccggaggccatccgctaccagggtgctttaaatctgccggaggccattccggatgaacagggaatcaaacgccatatcgaaggcatcctgtcaaaaaacaaaaactgcaatgaattctccaacttcatgggagccggctgcgcccagcactatgtgccggctgtctgcgatgaaattgcatccaggggagagcttctgaccacttacggagccgagacatgggccgaccatggaaaataccagatattctttgaataccagagcctgatggcagagctgttagatatgtccttcctgaccgtcccatgccactgcggcggtcaggcatccgccacaggccttcgcatggcctgccgtatcaccggaaggaacaaggtcctccttccccataccatgaaccgtcagaacctggctctggtgcgcaattacctgaaaatgatagatgcggaccaggaaattaagattgaactggtagcctgccgcagcgataccggaatgctggacctggaagaccttaaatccaggctggaccaggatacggcagctgtctacattgaaaatccaacctttctgggcatcatcgaaacccagggtgaggaaatcgggaagctggcaaaggctgcgggagctgaattcatcgtgtatacggaccccatttccctgggcgtgctggaggctcctgccaactacggcgctaccatctgtgtgggcgaccttcacggactgggccttcatctgaactttggcggcggccaggcaggttttattgccagccatgacgatatgcgctatatcacggaattcaaggagctggtggacggaatggtggagaccacggtacccggggaacagggctattcggttgtgctcatcgagcgcacccactatgccatgagggaaaacggaaaagaatttaccggaacccagaacaatctgtggaccgcgcccgtggctgtttacctgtccctcatgggcccgaaaggcatggaggaaatcggccataccattatgaccaacgcaaaatacgcagccaaaaaactggctgggattcccggcgtatcactccggtttccatctgtgttcttcaaggaatttgtggtgaatttcgataaaaccggcaaaacagtggaggaaatcaatcagctgctgctctcccgccagatttttggcggcgtggacctgtcccgggattatccagaacttggtcagagcgctctgtactgtgtgaccgagactgcagacaaagaatccatagaccggctggctggtgcgttgcaggctatattaaattaagggaggacattagaatatgaaacgagattacagcaaacatttacgcaggttccatgaagcaaaatgggacgaagagctgatttttgatttgtccgttcccggacagagaggtgtcaatgtaacaaagccaagtccacagataacagaagaagtgggcgacggcgccgacgacattcctccctgcatgagaagaaagacacccccgttcctgcctgaggtacaccaggccagggtcaaccgccactatctgcgtctgacccaggaaattctgggcaacgacattacccctgatctgggcgaaggaacctgtaccatcaaatacagccccaaggtgcaggagcatattgccaatacccatcccaacatcatcgacgtacacccgctgcaggatgcatccaccatccagggcatcctggaaatatacaaaaaaacagaagaaatgatttgtgaaatttccggtatggacgctgcctgctgtcacatgggcggaggcgccgctgcctgctttgccggagccagcgtgattcgtgcttatcatgaggcaaagggcaatacccagaaggatgaaatcatcaccaccatattctctcacccctgtgacgcaggcgcccctgccaccgcaggttacaaggtgatcaccctgatgagcgacccggagacaggcatgccctccctggaagccttccggagcgccttgtcagagcgcactgccgccatctttatcaccaatccggaggatacaggcatcttcaatccccagattaaggaaatcgtggatgctgcccacgaagcaggcgccctctgctactatgaccaggccaatgtaaacggcatcatgaccattacccgtgcaaaggaaatcggagctgatttaatccactacaatctgcacaaaaccttctcctcccctcacggcggcatgggacccggcgttggtgctctctgtgtcagggaaccgttaaaggcatttctgcccgtaccccgggtggaatacgacggcaaacagtattatatggactgcaattgccctgaaagcattggaaaggtccgcatgttcatgggaaatgccaacgtaatcctccgcgtttacatgtggatccgccagttaggagccgacggcctgcgggaagccgctgtgtgcgctgttctcaacaatcagtatatgatgaaaaaggtgggacagattaaaggcgttaagatattctatgccgaggggaaacgccggattgaacaatgccgttacagctggcagcccttaaaagaggacaccggctttggaaccgtggatgtgaccaagcgtctggtggatttcggcatgcagcattactggcagtcccaccatccgtggattgtgcctgagccatttacgctggagcctacggagtcattttccaaggatgatttggatgaattcgcggccatcctcaaagagatatccagggaatgctatgaggagccggagacaataaggagcgctccccataacgctcccattcataacaccctgttggatgaagtcatggattttgataaaatagcagttacatacaggcagcttcgcaaacgcatggaagccggcacaatcagcaaggatattctcggccagtagcaggtaaaagcaaataagaggaggaaacaagaatggagcacaaagataactatgaccgactattgcccatgccggtaaaactgggttttggtattgccaacttaggcgacacagtcatcactgagtttgtaggagcatttttcatcttctttctgacaaatatcgcaggcgtgcggcctgccctggccggtaccattgtctttctgggagttatgtgggatgccatcagcgatcccatcataggaaccatgtcagaccggtgcacactggaagccgggcgcagacgtccgttcctgctgatatccaccgtgcccctgatcctgctgactaccatgatgttcacaaaagtgaacttttcagctaacttaaagtttctatatttcgttgttgtgtctgtgttttactggaccgcttacaccctgttcaatattccctacttgtcactgggttctgagctgaccaccaacaacgatgaaaagacccgcgcttcctccatacgccaggtattcggcacctgcggcctgttctttgccaacgccctgcccatgatactggtgagcctgtttaagggccagggaatcagcgaggaacgtgcctggacgtttgcagccctcacactgggcgccatagcaggtactgccatctttatcacatggcgcgccaccaggggatgggaaatcaaatatccgccccagagcaaggatgagcccattttcaagagtctgggcaaggtgctgacgtataagccttacattttggtgattgtggcctccttcctcttctattttgcattcaacacctgcaatgccagcgttatttacaataccatcgtggtggtgggcgcaactgaggcagatacggctgttgtgtatctggcaggcaccattgtgggagttatcctgtccgtgctcattggaaagctggctgttgtgtttgataaaaaatgggtctttatcaccttcatggccattgcgggctttgccctggtgatattcaaatttgtgggcttccacagcatcacggaccaggttatccagttctgtatggcgcactttgccattataggcttcctggtgctcagctataacctgctctacgacgtatgtgaggtttatgagtttaagacaggggagatgctcaccggggtcatgatttcctacttctcatttttcatcaagctgggcaaggcaaccgcgctccaggcagtgggaatccttctggacctgggcggctacgacgcgtcgctcaccatacagccggacagcgccaaagccgctgtcaccaatatggcttccatcatccccggatgcctgatgcttctgtgcgcgctggttgtttgcttctatcccataaacagagtccgcttccgcgccatgcagaacgccagaaaacttaaggatgagggaaaagcttactcaacaagtgaattcgaccgtattctgtagtgtctgacaggttttgcaaagatgaatctctacccataagaaattctacccataaaaaatggcagaaaaagggacggaaaatatccgcccctttttagtatgttctattcccggccctgctttacctccccggccgccttcactgccgcaggcttcaccgcatcccacttcgccgcatccctcttcgccgcatccctcttaaccgctgcccttttcaccgcctcagccactgccttagccacacgttcatcaaaagcagaaggaatgatatactcctcccccagttcttcaccgctgaccaggcccgcaatcccgtaagctgccgccagcttcatgccgcaggtgatgtccctggcccggcagtccagggctccgcggaataatcctggaaatacaagcacattgttaatctggttggggcagtcgctcctcccggtagccatgacgcgggctccggcttcctttgcttcctcatacataatttcaggcactggatttgccatggcaaacactatggcatcttttttcatggttcttaccatgtcctttgataccacgcctgctgccgagacaccgataaaaacatccgcgccggcaatgacatcctcaagccgccccttttccttccttacgttggtcatcagggaaagcttttctttatgtccatccatcttttcgcggccgggacacagcgccccgtgctcatcgcagacaatcaggtccttcacccctgcaccaagcagcatctcagtgatagccgtgccggcgcttcccggcccgtttacaatgaccttaatcccatccatctgctttcctgtcagcttgagggcattgatcagggcggccgtggccacaatggcggtgccgtgctggtcatcatggaaaacaggaatatccagctcacgctccagccgctgctcaatttcaaaacagcggggcgcgcttatatcctccagattgatgcctccgaatgtgggggcgatccgctttacagtctctattatttcctctgtgtccctggtatccagacagatggggaccacgtccacgccgccgaattttttaaagaggacggcttttccctccatgaccggcatggcggcctccgggccgatatctcccagtcccagcacagcggttccgtccgtcaccacggccaccaggttgccttttgccgtataggtgtatgcctcgctcttgtcctccttaattttcagacagggggcagccacccccggtgtatatgctgtgctcagctcatcccttgtggttaaaggaatcttgcttgccatctccagcttgccgtgattttcccggtgcatttttaaagccgcctctgcataatccatatcccgtgcctccccgcgtcattttgttccgtactatttttcatctatattattcttcatcagcagctctttccccgatatcccgggctcagtcatccgcaccggatccaggatatggtccagctcctcctcatccagcagtccctcctggagaattatgcttctcacagacgtaccggtctgaagggccttcttggaaatatccgccgccttctcatatcccacatggggagaaagggccgtaatgactccaatgctgttttccaccagggagcggcatctctcctcattggccgtgatgccggatacgcagttgtccacaaatgtcctgaccgcataggccagagtgtcgatggactggaacatacagtagaaaataatgggctcaaaggcattcagctccagctgtccggcttccgccgccatggtgatggtcaggtcatttccaatgatgttaaaggcaacctggtttaccacctccggtatgacgggattgaccttgcccggcataatggaagatccgttctgcctgaccggaagattgatttcattaaagcctgcttttggtcctgaggacatcagtctgaggtcgttggcaatcttggacagcgtcaccgcacaggccttgattgcgcccgatacagccacaaagggatccagattctgggtggcgtcaatcaggtcaaaggcctgcacaaactccatgttggacacctccgcaagattgggaacgattcttctcagataggcttcatccgcattgattcctgtcccaatggcagtgccgcccatatttaaggtacacatctcctccatggccttgtccatacggcggatatcccgcatgacagctaccgagtacgccttgaattcctgccccagacggatgggcacagcgtcctgcatctgggtgcgccccatcttgatcacatggtcaaattcctccgccttatggctaaactccctgtgaaggcgcataagctctgatttcaggttttttaacagccgcagggaagtcatcttgccggccgtgggaatcacatcattggtggactgtccgcagttcacatggtcgttggggctgactataaagtaatcacccttctggccgcccagaatctcgatggcgcggttggcaatcacctcgttggcattcatgttcagggatgtgccagccccgccctgaatggggtcaacaataaagtcctcatggaacctgccttccagaatctcgtcgcatgcctgtacaattgcctccgccgtctttttttccagcagcccgatttcgcagttggtgattgccgccgccttttttatgtatgcaagactgttgatgatttccgggtgcatattcagaccagtaatctggaaattctctgccgcgcgcatggattgaaccccatagtatacattttccggcacatcctttgcgcccactgaatccatttccaccctgtaatcttttcttccgtccattttaacgaaacctcccatatacgaatgatataatatcaagttgatgttattataaggctgggttataatataatccaatacatatggttctatattgattataactttgaaagtatactttttggaaaataaagggggatgttatgtttcagggaatggaatacatctacacggtctatcaggaaaaaagcttttccaaagcagccaggaagctgttcatatcacagccctccttaagcgccaccgtaaaaagagttgaggaacacataggctatcctatttttgacagaagtacaaagcccctgaccctcactgagttcggcaaacggtatatcagctctgtggaacaaatcatctccgtagaacatgaattcagcagcttcatgaatgactggggcggattaaaaacaggaaaactggttctgggcggcagcagtcttttttcatcatgggtgcttcctcctctgattggcagctttacacggcagtttcccatggtaaaggtggaattgatggaagaaaatacatcggaactcaaattactgctgcaaaacggcggaatcgaccttatgattgataactgccagttggacaagactgcctttgacagccgtgtctaccgaacggaatacctgcttctggcagtgccggcagcccttgacgtaaacagggaagccgcccggtaccagattcctcttgaaatgattcatgacggttccttcctggacagcagcattgcgcctgttcccctggagcggttcagcggggagccttatatcatgcttaagccggataatgataccagaaaacgggcggtgaaaatcctggccggccataacattacccctgacatccggtttgaactggaccagcagcttacatcctacaacatcacctgttccggaatgggcatatccttcatcagcgatactctgattaaacaggtccccttccaccccggcgtggtgtactataagctggacggcagcctctgccagaggaatctgtatttttactggaaaaacggacggtatttcagccgggccatggaggaattcctcaatatagcaaaaggggatgcaaaaccagcgtaagccggtactgcatccctctttatttcatattattatcttccgctcccctgccccgcagagccgaacagcctcatcttttccatcacggaccgtttcaccgcctctatctcaggcagtatcatatccgtaagtcctattccttccctgtatccgctgcctgcggccctggccccggcctggttgatatctgtaaaaatattgaccttgctgattccccgttcaaccgctgtcctgaaatcagagtcagacagaccggatccgccgtgaaggaccagaggtgtggaaatggtttctgcaatttccgaaatccggtcaaaatccagcttaggcggaagcttataggctccatgggccgtgcccacggcaatggccagtgcatctgccccggtccggtcaatgaagtcccgcgcctggaccggatccgtgtaaaactgcgacggttcggccccagggccgcttccttcagcgcttcctccttcattatcccctacatggcccagctccgcctcaatggaagcaccaaaggaatgagctgtttccaccatcctttttacatgctccatattgtccccgtagtccatagtggaacagtcgtacataatggagctgaatcccagttccagagccagcctgcatgtctcctccctcaggccgtgatccaaatgcaccaccaccggaaccgacgccctctctgccatgggaatcagaaggtttgccaggtcctctaagggaccatagggcagcagtacctctgctgttccgatgataacaggggaatccagttcctcggcagcctccatcacgcctctggccagctccaggttgaccgtgttaaacagtcccaccgcatacttccccttcctggcgggaaccaatacatcatttaagtttaccagcattgtcctttacctgtccttcttactttgtctttaatgcgtcgtcaaaggcaatatctgacggtgagaaattgatcttcttcgtaaacgcgcacgcctctgtacccccgaaaatacggtccatgccgctgtcctcccattcaatggaaagaggcccttcatagcccttcacattcagtatccggatgattttatcaaaatccacatccccgtggcccggcgatacaaagttccacccccgtcttggatctccgaaggtgatatgggagcccaggattccatttcttccgttcaggttcacggccgcatccttgatatgtacatgatataccctggaggcaaaatcatagaggaacatggccgggtccattccctgccaaatcagatggctggggtcaaaattaatacccagtgtctcgcggtattcaaacacttccagcagtttctgcgtgctgtaatagtcaaaggcgatttccgtcggatggacctccagggcaaacttcacgccgcactggtcaaacacatcgaagataggggtccacagctccttaatctgtttaaatccctcctctaccatttcctctgtggtctgggggaatgaataccacatcttccagataggtgaacccatgaagccggtcaccaccttgactcccatggccttcgcggccatggcagcgtattttaactgctgtatgccccatgccctgatttcctccggcttgcccgccagttctgggggcgcgaacccgtccagacgcgggtcccacacatcgcccacacactgacccggcaggtgggcgccgatagcccagcatccaagtccgtatttttccagagtgcccttcaggttctttacatactccggatcctccgctgccttctgcaaatcaatctggccccaggaagcaatctccagtccgtcgtatcccatgtcctttgctgtcctgcacatctcctccaaacccaaatcagcccactgtcctgtaaaaatcgttaccggtcttgccataatcatttcctcctaaactccacccacgtattcccgttctgattgctttccagacaggcttccacaaacgccagcccctcagcgccctggctcaccgtgggataatccaccatttccgctgtaaacgttccatccttttttgcgcttacgcattgtgcaaagctgcggtagagattgcccatggcctcaaaccagccttcgggatgtccggccggaatccttgcgtatttacctgccctttccccgatggcgccgtatcctcggtgtatttcccggatggtattgtctgcgtcaataaccgtaatcttatcaggcgtttcctggaaccattggatggtgcctttactgccgtagatacggattctcaggctgttgtcatggcccaccgccacctgcgacgtccagtatattccggtggcgccgttgtcatattccaccagaatgctgtcgttgtcatccagtacccgcccgggcacaataacatccatcttagccagaaggcgcttaatcttaagcccggtcatggcagccaccgcgttctccacatgggtgcctaagtcacccagacagttcactccgcctgactgaccggggtcgcagcgccactctccctgttttcccccgaaatcgtcctcaaaggcaagccagccctggggatattccgccatgaccgtgcgtacctctccgatggcgccggaggccaccagctccctggcatattttgcagtcacataacccatgtaggtataggtaaccataaacagaagtcccttatcctctgccagggcttccagctcctttgcctgccggtacgttgttgtcaccggcttatcgcataccacatggattcccgcctccaaaaaggcccggcagatttcataatgggactggttgggggtgaccactgtcacaaagtcaacgccgtcctcacgttccccctcagccctggccattgtctggtaatcctcatagcaccggtccggggaaatgccaaggctttccgccatctgcaatgacttttcacggtttcttgaaaatacccctgccgcgatggcagctgttccatccagcccgattgcccggcggtgggcatcgccgataaacccatccggacccccgcctaccattgcgtatgtcagtctctttgccatcttttttctcctttcatggttggttctgctgcttttttacgctccgccctgtcacggtctgtattcccgtttgctccatcccttcctgattctctctttcatttcctccagggaccgtaatccgctgagggcgtcataagcagccacacagcatgccccttctgctgctgccatctccactgcctcctttaaatcagcttctccgagaacagaggccaggaaggcggctatgctggtatcccccgcgcctgtggcggataccactgtatccggttcaaagctcggctcaaagccctctttgcccttccaggcttccatggaaagattcagctgcctgcacatgtcctctatgccgtttttgcatgccgtgcggtaatagatgcctaaagcgccgcatttaatcaggacaaccctggcccccatgtccagggccatctgacccagaggctttacatcccggacccggatcacctctgtgacgtcccttccatccgcccgtttggtccactcccggtaacgctccccatccagcatgaagcacagctcctcggcgcttggcacaaagaaatccacatagggcaatatatttcccaaaatccctttccagtccgctccggctgcttttgaggccgggtcaatggcggccatgtctaaggatatggcggttcccccctcttttatctgcctgaacatccgggccatctcttccccctggttccggtacatgttttgcatcagggtgggatatccgaaatggaacaggtccgcctctttgatcgcctcaaaatcaagatcgctgcccgaaaaattcacattggcgcccggatcatgaaggaaaatacggtcaattcccggaatagccaggacaacggaataagaagtcttttcctggtccgccaaaatcatatcctcagccgccccgtatttctccaggcagttaaggataagggttcccagttcatcctttcctatcttacccatcagacggacatccactcccaggtgcttcatggccaagcctgtattggccactgccccgccgggatggatattcaccccctccatctgtaccagctgtccgggcgccagtatccttcctgcctctcctgtgctccctttcgggaacaggggagtgatatcaatgcatatatgtcctgccgccaccgcccttttgtcttttgctgctctcttgctttccgctgccctctcatcagccaccacaccaccccctttcacgggtttatccctttggcctttccagttggccttcccgttttaccttcctatccgctgttaccatccttcacattcacatcagacaaggcccatcaggagattcatcacatacatttccagcccctcaaagtctctgttcctcacacattccttctggaactcatagtcaaaccggtccgccttttcttccagtgccttaaatatgttcaggctgttctccagatgcttatagctgtcctgatccctggtggtcctcatggcttttacatccaggcccacatactccccgttttcaccgtagccattctccttcagcacctttacctggttaaaggcagccctcaggttttccacaccaaaggctttatcctggtcatacttgataccgttctggtcattgagatggacggtcatcagttttcccattgccattgcaaacccgatttcatgggcagggtcaaggccggccaggatggcatgggcactctccagattgccgcccacccgtcccgggtcaatggtggctgccgacactgccagcacatggcccatggtcccgcagatgcttctgtcaatgggctcgtttggcttgggctcaatgcaaatccggatatcagaatcatattccagcattttattgatggcctgaatcagcatcttcgtggcccatacaggggatttggactccgcgcagagggtgccctcccttgccagccacagcaccaccatattacagcccagctcctttgcaatgtcaatggagcggtaagccctccacatggcgtattccctgtcctcctctgaggtgctcataaatccgccgtccgcggtccgcccgtccatccagagcctgggagccacaaactcagcagccagtccgtatttgtccagcatctttttaagggttctggccttttcctttatctcttcctccgtataatcattgatgttgggcaccgcatcgtcatcgtggaactggatggcggaaaaacccagctcagcgaatgttctgattttctcctcaaaggcaatttcatctctggtcgcgggtccgtaggagtccgctcctgaatgcacattccacggtcccacggaaaacttgaattttgtcatatccttaccctcctgattcatcggttatctgtatctcatacctatactatatcaagttcccggcctcaaatcccaaacaaatttacggttcaaaccatgacaaatttgctttttactttacaagcccgcccccggggacgtatactgtcagaaagggaggagataccatgaaccaggagtttgaaatcatatcccacagccagatgaactttaagctttttcttgtaaatatgctttaccgcaccccccatatccataaggattttgagctctgccttcttctggacggcagtctctttcttcaggcccaaaatgaaacccacagcctggaaaccggggatttctttgttgtgaatccatttcaaagccatgagctgaaggctgattcccctgccctcttagtttcattacaggtacacccatcctttttttcttcttactacccgcggattgccaatctggaatttacctccctgattcttcaaagggacgggacggatgtctgcaaaaaactgtatgacatgatgatagagcttgcctgcctttacctgaaaaaagctgacaaatttgaattaaaatgcgtcggacttttaaatctgctctttgccggcctgctggacaccctgcccaacaggcttctgtccgacaaggaaaaaaacgcctcccagagcaaggcttcacgtatgcgcaaaatcacccactatatcgacgaacattattcagaaaaacttctcctgtcggacattgcccgcaaagaagatttgagccttacctacctgtcccacttttttaaggattacctgggacttccctttcaggaatacctggccaaaatccgatgcgaaaaagcccgccagcttttattgctgacggacttcccattgttagacatctgcatgtcctgcggtttttctgattccaaatattttaacagcggcttcaggcggcagtatggatgctcccccaaggaataccgccggaatttccggcacgatgaactgaagcagcagcaaaaatccatgctcaccacccaggagttcctgtctgcgtcctccagcatcgtgcttttagaacgctgccttcttccccagccagcaggccccgcagcgtgttcctgataaaatcacggtatgacatgctctgcggacaattccttgatgacaagacggtatgttcctgacggaagttccccgtacattgtcagatgattgatcatgctctgtttgcctccgtccggtatataaaaccccatgcagttaaatccccagttgcccggcatggccggaatctcataccacacgccgtcaatcagaacctgcagctcataaaattcaccgcagctccattccccgccgctctcattgttaatggtcactgccgctatatcattatcccaggaatccagcgtcatggtaattcccctgggaggatttaaaggagctgccggaaccaggaaccgggtattccactgttctttttcctgtgtaaatacccgcgcacacggaaagtttgtaaaagagggcagttctcctgcactctcccactccttcctctgcttcagagcttcaaaatcataatcgaattgatacacagacccatcctgggcaatccacctgccgttggtccacgccgcaaacaggctcagtccatcctcccggccaatctcaattccgtatacaggcagggaggcatccttggccgaccagtcctccgccggctctgcctttacggaacttaagtcatccagtatctccctctccttttcgctgtcaaacatatagtaaaggcgcacagaggttccgtcgtatatgaacagagtcatggcgctggtttcaggcgatgccttagccaggagaccggaagaatccagcttcgcaggctctgcttcaccctttagaacaggcacttcctgcacgttgagagcagcctgttctgattcggcctgtgtctccgtcggactctgtttttttgttctttctttttcattcttttccgtatctgccgtacctgcctcagctttttcagtactgtccgccggtgccttcctgtctcccgatgagactccggccttttctgccggcactggggcatctcccatcatcttaccgcaggcccccgcagccaccataactgaaatcaaaactgccgcaatggtcatcacttttctgcgttccattaatatctccttctgccgtcacactcagaaccgtcaatcgttttgaatattataacagacaaccccataaaaacaaagtatatatcaccagattacagcggtttttcctcggttccagtctgcccgctctgatatcttcccacaggtcctattctttttccctgacccatgttataatttaagcacctgaattcaccccaatacagaacggagaatatattatgaacgagccccttcactttaagacacgtgacgagttccgcatttggctgataaatcactgcatgtccggcggcggcatatggctgaagtttgaaaagtcaaagaatacagcgtttaaggccggcgacgccctggaagaggcactgtgctttggatggattgacggagtgatgaaacggattgacgatgaatcctatatcaaatatttttctgcccgcagaaaggacagcaaatggtctgaaaaaaataaagctctggcagaagacctggaaaaacgcggcctgatgactgattttggaagagagaaaatacaggaggccaggaagaacggtcaatgggacaagccttccggaccgcctgctgtcacagcagaacaaatcgggaccgtggccggccttttaaaagaacatgagccggcctatactaattttcagaaaatgcctccatccgtccaaaaaacctataccagggcatactatgatgccaggacagacgacggacgcgccagacgctttgcatggatggttgaacggctggagaaaaatctgaaacctatgtgacggcttatacggcagtcattttactatttcagccctgcttttctaaacacctttttgcccttttgaatgatgattccgtccatcagcatgttccgggtcacggtaaagtctatggattccacccttttctggctgacctggatgccgccctgtgtgatcagccttctggcctcgctttttgaggccgccagtctgcacagcaccaggagatccatgatattgatgctgccctggacaagtttttcctccccaacctctgtaaacggcatgttgtcatcatccatggccccggtaaacagggaaacggaggtctcctttgccctgcgtgcctcttcttccccgtggaccagagcagtcaggtcataggccaggatttcctttgccctgtttagctgtgctccctcccatccgtccatggcatcaatctcttccaccggaataaaggtcagcatacggatgcatttcatcacatccgcgtccgcgatattcctccagtactggtaaaactcaaagggagatgtcttctccgaatccagccatacagcgcctcttgcagtcttgcccatcttgtttccttctgagttcatgagaagggtaatggtcatggcatacgcgtcctttcccagcttcctccgaatcagctccgttcctcccagcatattagaccactggtcgtcccctccaaactgcatattgcagccaagttccttgtacagatggtaaaaatcataggactgcataatcatgtaattgaattccaggaatgacagtcctttttccattctctgcttatagcattccgcccgaagcatattgtttacggaaaaacaggctcccacgtcccggagcagttcaatgtaattcagattcagcagccagtccgcattatttacaacaatggctccattctccccgtcaaaatcaatgaaccgttccatctgcctcttgaagcattcacagttgcggcgaatcacatccggccccatcatggtgcgcatgtcggtgcggcccgacggatcgccgatgtatccggtgcccccgcccaacaggaccacggggcggtttcccgccatctgcagtcttttcatcagacacagtgccataaaatgccccacatgcagggaatccgccgtggggtcaaagccaatatagaacttagcctttcccgcatttacaagctctcttatctctgcctcatccgtcacctgcgcaatcagtccccgcgcttccaattcttcataaattcccatgtcttcctccttttagacaaaaaaataagcccctgcagcagcttgctgcagagggcaggttatgcggtaccacctctgtacttgaatgtccttcacagaacattcctcatcgagtgtctgtcaacactctcacgctgtatcgggcgttcccgtcaaaccctactaaaaccttcaggctgctgctccggagcgtattcatacagtctttcctgcgtccttccaccaaccgggcgctctctgtaagaaaagcctctgtactactgttctccttcatggcattctttattacatgtgcagtatagcaggggacgcgtcaaaagggaagtcacagatttacacatgtgtgacaggagacatctgatattttttaatctcttccggcagggtttcacaaatcagccgcgccatcttctcagccggaagatctatattgccaagcatccactgaatcaccatgtcgcttccgccgcgcacagctatttcaatggaaaaccacataatctcagaccggatgtcggctcccctttgctttaggaatgtctcataaatccttctggtaatctcgatatcatgattcttcaggccattgatatcacggctctcatatgcatgtttcaggacactgcgcttttgccggtaaatcttcaggcactgggtcagcgcttcctccagaccggcgcccaacacaatgctgccaaagctctcttcgtaaaattcatcgtaataccagttaaccagctcatatttatcacaaaaatgacggtaaaaggtccttcttgatacgcctgccatctttacaatttcacttaccgggatatcatccaggctttttctgctcaacagatattctatggattctgacaattttttcctgctgtctgctatctcatccaacgcaactcttacccttcttgtactgtttttgcacctcttgtgctgatacatgctgatattatatcctttcccgccgttcatggcaatatccagactaatatacggcgctgcattctttcaggcggaaatcagattacagaaagggacctgctggacatgcttaaagaaacactgcttcggacttccatgaaacagtgcggctccgcttacagttttagtaaacaggagatatattcattttcaggttgacacagccattgtgttatgagatacttttatatatagtatcgaatactacatatggaggtgttgtatgaaaacagcgattttaattgattctggctgcgatgtatcccatgagttaatccagagatttcacatgaaggtaatgcaccttcatatcatttatccggaacgagattatgttgacggggtggatattctgcctgagaccatttatcagcgttttccgggagaaattcccgccacttcaacccccagtccccaggatgtgaaagatatggctgaagaaataaaggctgagggctatacccatgtgctggcattctgtatttccagtggattaagcggtacatataatacggtgggaagcattctgggggatgaaaaggagctgacttcctttgtgctggacaccaggagtatttcctttggagccggtatactggccgtatgggcagcgatgcagctggaagaaggcagaagttttgacgagctgaaagaaatgcttcccaaaaaggtgggggattccaaggttttctattatatggatacactgacctacctgcgaaagggaggccgaattggtctggtcacctccgtggtaggcagcattctaaacataaaacccattatctcctgcaatgaggacggagtatactatactgccgccaagatacgcggagccaggcagggactatcccggctgctgacagaagccaggtcctttgcaggcggccgcccctgcctgaccgccctgttaaacggtcaggggcaggatgcatccgatgaactgagaccccggctgattgccggtatcccggaaggacgcctgattatggaaaaggccatcaccgcgtccctggctgtacacaccggtcccggactggtgggaatcggtgtgcttcgcctgtagcaggcacaaatatattcacacttgccgcatatgaaacatcctgcggcattctttttgccatgccttctgaaccacggaacttcctgcaaaatatccgcttctctttcctctctaacttacctccgttctggcctcaaacccgaattcagctcctgcctcccgtaaattctcctccagttccaatccgcgcataagcgttccgtttactgctaaaagaatatatttttctgtgtattatcagccatattttccgcctcctccgcatcttatcattcacagcggcttataattttcataatataataaaaggtcaatctcttacctgcgtccaagctgccagaaagcaacggcgcttgccgcagcgacatttaacgaatcaacgccgtgagacatgggaatgcggaccgtataatcacagcccgcaatggttcctgccgccagcccatccccttctgtccccaggataatagccagtttttcctctgacatcaaaccggaatcatcaatactgacagagtcatcgtttaatgccatggcagctgtcgcaaatcccagctcccgcaaaaatcccaccccctcctgaggccaggacagccggctgtccagaaaggtccatggaatctggaaaacggttcccatgctcacccgtacggcgcggcggtagagaggattgctgcaggcggatgtcagcagaactccgtccatattcagggctgctgctgagcggaatatagctcctacattggtgggattcatgacattttccagcacagcaatccggcgcgccccttcgcagatttcctcaggcccgggcaggggcggccggtacattgcacagagcatgccccgtgtcaggtgaaacccggtaagctgtgtcaatatatcaaattccgccgcatacactggaatctcaccgcagcgctgtattatttcccgtgcctggctttccacatgcttcttttccatcagcatggatatgggaacgcatcccgcgtccagagcgcgctctatcaccttggggctttcagcaataaaaacgcccttgtccggttcatgacggtttaaaagctgcccctctgtaagccgggcgtaaatatccagctccggggccgcaaaatctgttatttcaattatatttggcatatggtatctcctggtcttctttcgctgtttcctgttttcctgtttaattccattacctggaatagggccttattgccctgatgattattaattatagtatataaagccctgagaatccatggttttatgaaaagtccggcctggaccggcagctgattaaaatagaaaaagagctggggcaacagctcttgaaattgctttagcacattttctcaaaaaactcgtacatcaaacgcataagctccacaccgctcctgaatcccacatccccatatttagagcggaatatcccctgtatccctgcgtcctgacggcccacaacccggacagaggccgcgggataaaccggaaattcccttaaaacctcccgctcaaaaccatactccttctttattttccctctcaaatccacaaagggaaccgttactgcatctttattccgtttaccggtcagactccgggggactctccctctcatgggggcacccactgcatccattatatcttccataatgaagatcatctggtcaagcccctggaagtataataatttttccacatggaatgattttacataccctctggcaatcccttctgaaaatgactggaggccaatcagaaatgtatatgtatattccggataacgccctccgtcacgggcaatatcatcctccatgattataaatttttctatttctcccatggccctctcctattaaattttatcatgcctgtctgtcctgcaattcatatctgtcctgtgattcatgcctggccggtctttcgtatccgtccagcgatgcaggattgttccgattgcctcatcctcagtggatgccttctgtcctgtcagatagatacacgcctccttccattcttcctgtgtaaagtcatctctgttacgcaggatgaattccctcagccaccgttcttccacgtgcatgaatcgtaaatctgacatatactcacattttgccttcaaggccagatactctaacaaggaacaactcaccatctctgtatctccttccttaagcagcaccaatccggtgatgcatgtgaattccggcgttttcatgtggattaccccagaataatcattctgtggtactttctccgcctgggcatgtatcaaaaagaatccgctaaggattttataggaaactcagaggaacaatcaagcaaatttgacacaccaagaaaccggcaagtatttttttccttcccggtcttgtttgctttgaggaaaaataatatatgtatattgacgcagtccgccttttattataaaatacaagaagattgtaattttggtttgcagaaatgccggcatgataccacagaatgattattctgtggtattttaatgtcctttgcaattcccatacggttcatcaccttctcataatgtttcaggctggatgccacgtaaatccgcgttgtctctatggaggtatgtcccagaatatctgccagatgtgccagatttttctcgatggcatagaaactctttgcaaacagatgacggaaattatgaggaaatacctttgactggtccaccctcgcctcccggcatattttcttcatggaatggcatatattacttctgtccagacattttccgctctttgtcctgaatatacatccgctttttatatctgcatcccttatatactccttaagctgtctgaccagatttcttggaaaaataatgaccctgtattttcccttcatatttatttcagcatttccctgataaacagcctccacagtcacatatggcagttcactgattcgtatgcctgtcccgtacaaaaccagcatgaggaaatataactgggtctttcctgtacggctggctgtctccaacagccgtctgcagtcctgttctgtcagatcccgtttctcatccatatagattcttttctggaccttcaggaatttcactttatgggcctccaatcccatacactttaaatatgcgtttatggctgaaagttttccgttcacggtccgggccctgcatcgacggctgagatgcccccggtactgtatcagcaactctttgctgatacattcctgtcccataaaatcaagcatctctctcacatcatgaagatacttgtttatggttgattttgatttttcctcgtcacacaaatgcgattcaaatttcatcagcagcatttccatttccatttccataaaaccctccatttcagccctgttaacaagttgtcattgatgtcatataggatacagaatatccttttttagtttttatattgtaaatcatatttatacatccaaaaaccggggggttattttttatggaatgaggcccatcgttaaaattccgctgtcctgactcagatggtacgattacggccagagaggaaaacataacaaaaacagctgcttacctgcgtatctaacggcccgcactgtcaaagcagctaaaggatatagcactggaagggatgctgccctgaaaacggacagaagacattctggaaatagcggataaaacaacggatgaattcaagtcactgaggatagtactgccaggactttcgcatttttcgacttatttatatcaattttgtcgtccaatctcccttgtcaaaccacgcctctgcgtataacgtaacattggtaacaaaaaccaaggagggattaacatgaaccacgaaaaagaaatcagtaacctgcttcggcgcctcggtgtaaacaactcctatgtagggtttcgttacacaatctacggcgtcatccggaccgtccatgaccccactttgctcgcttatatatccaaggggttatatgtggatatagcggtccattaccagacctcaatcggctgtgtggagcggaatatacgcactcttatcaatacgatttggttacatggggacagaaaactgctaaatgaaatctttgattttgaacttagccagaaaccccgcaacggggcatttatagacgcgctggtaaattatatagtgatgagaggcatcagtgaagaaattacagactctgcctgtcagcagcaggcaacataaccctcccgcaccgctaaaaggccgtacagcctcccctgccggcaaactctgtaccggccgggatggcctccgggcattactcacgtacacagcaggctcacggcagccggcatatactcctttttctgccaggattataccgggtacctgctcataccctccgtacaggtctgatatatttaaaatactgttcgggattataataaaaatacatgagccggccgggagaagtatctaggcaatagcctgtatcagcataatcaaacgctgccattgcattttctattctttcctccacactccggttttcctgttcataatcaaatggcccgtgttcaaaaacaatatactcggcttcaggaatgtcatccagaagcatctgcggcggaaccgctcctttgtattcaggaggaagccgtactccccagcattcagagcgcagtattccccagtcacatagtctgccatccggatcattcatataggccatgatttgaccgcttccacagttgacctcgcttcctccgccatcgtccagttttcccttgatgctgtccagcaagccgcagaccgtctcatagtcctgccctggaataagattctgcttctgccaaaaatcccaatatccgttgctctcacggtttttaatatacaaaaatttgtgagcgggtatagtaacaaaataaattttaactccatctgctgattgaatcataccgatttctcctaatcctaaaaagtagcggtcaaaagcacttatctttgtacggagaaccacgggtttaggatttttccgatattcgctgggcgtcacaccgtatgtttccttaaaagccctggtaaaagcctcatgtgatgaaaagccataatcaaaagcaacctccaaaagattcttctggctgtccctgacttcttttaatgcaaaggccaatttcctgagctgcaggtaattcctgaattgtatgcctgatatttctttaaatttcctcgacgtataatattcagaatatcccagtctgcaggaaagggcacgcaatgacaaggcttcgtcattataacatttaatacaccggtcaatttcatcaacaattatctgaatctgctttttccactcatacatccgtctgtttacctcgtttcaaccactctgcgattcattatacaaaaaaaatggggctgatacttgattttacttgctgtatggcgccatcttcccttcccaattataatacgtctcccgctgattattcacaagcctaaataaatgataaacaggggaaatataaaattgcggagccatataatggaagaacagttaaaacattctgccatgactgacaaaaataataaaatttccccttgacaatattctaaaagcaaggtatactcaagtagtattttttataagattttgatttcacatgtttttgtaagtcattattcctatgatggtttacaaaaatatgtgatttttttattttatttaaaatcacaataaaatattaggaggtatctttcatgaacaaaggtacagtaaaatggtttaactcacaaaaaggatttggttttattacgaatgaagaaaacggcgaggacatttttgttcacttttccggtattgctacagatggctttaagtcattagaagacggacagtccgtaacctttgacataaccaatggcaaccgcggcttacaggctgtaaatgtctgcgctgcataatattcaagatataaatggggcatatcacaatatgccgccgtaccatacctggcggggagaaatccccgccatatccagttaaagttcccctgccgtgctacagcaagacaggggcttttgtatatcaaagaggacacctgggtcacatcgcctgcttatccatctaaaaaacagcggattttgccgccatagcagaatccgctgttttttctttagaggctggcagattgtgtccggatattcaaatactccgccaccatctccggaggcaccatgttgccgcctgtcgcccaggctatatggacagcctgccccatacagccgctgagacccttttccctgatataactgtccatttcatctgcatgaaggaacgcggcaaaggaggcgcatgcagaaggttctatgaatatatcctctgttttcacaagcgcgcgcatcagttcatacagctttccatcctcgattgtgcagattcctgcaagccgcttctcaatcacctttcccacaaacgcagacggccttccgacggccagcccgtccgcatctgtctttccactgattccaaaatctccaacacagaccttatcatgctctcctgtggccattcctatcagcatacagcaggcctgggtcggttccatgaaaaagcagtgaacgcagtcgccgtaaatctctttcagaccataggccaccccgcccggcgctccgccaatcccgcagggcaaatatacaaatagcggatgttgtctgtccacctggattccctgttcctccagctggtgtttcagccgttgtcctgcaaccgcatatccaagaaacagattgacagaattctcgtcatccacaaaataactcatagggtcctggtcggaactctttcttccttcctccacagccgcacagtagtcggactcatattcgataactgtaacccccttgcttctcagcaaatccttcttccactgtttggcatccgccgacatgtgtaccgtcacctggaatcccagtttggcgctcatgatgccgatgctgagccccaggttaccggtggatcccacctgaaccttataccggccaaagaactccctcatttcactggtgttcagtttccggtaatcctcattttcgttgagaagccctgcctcaaaggccaggtcctccgcatgtttcagcacctcatagatacctcccctggcctttacagaaccggatatggggagatggctgtccattttaaggaacagttttccggttataccggccccccactcctggttcagttcctgtctcatggccctgatttcccgcagctccgattctattatgccattccgggcagccgtctcaggaaaaacctcggccagataaggcgcaaaacgttccagccgccttgccgcatcctgtatctgctccttcgatactgctttttctccctgcccgctctccgggcactccctgctgttcacccagaacacttcttttccggcggcagcttccgccaataccggtatctgtttcatatatgcttctattcttgaatccataatatccattcctttctgtctgtaaatttatagtttctttgcgccctattggttctctctgaagaattccctggtcatcctcattaccaccggtgaaagtttaagaagagccagcacattgggtatgattaaaagtcccagcatacaatcctgaacagaccaaacgatcccggccgtgctcaggcttcccaataaaatcaatacgggaaacagaatgcggtaaaaacggtctcctttcaggctctttatgtacataaggctcacatggccaaaataccactggctcatgatggaggtggatgcaaacaagatcaggctgaccgaaaccacgtatttaaaaagaggagcgacggtcccaaatgcctcagccgccaatgacgccgcacttgcaccttccagaggcaccccgcttgccagaatggaaaaaccagtggtgctgcagataaccatagtatctacgaacacctccacaacaccataaaatccctgtctggccggatggtccacctgcgccgccgaatgaataacggccgcagatccttcgcctgcttcattggaatacagccccctggccacaccaaaacgcatggcctccttcattgtcagtcccgcggcggcccccatccctgctttcatggaacaggcgtcctgcaaaatgcttctgaacatgggaaggatggaatccagattagtgaacaccaccacgatacctcccacaatatacagcgatgccatgaccggcacgattttctgagccacatccgccaggcgcttaagtccgccgcctataatgaaaaccatgacagccgccattaaaatccctgtgactgctttcgggactccaaatacctgaaaggccacatccgatatggtattggactgaatcaacgttcctcccgcattctggaaaaacaggagaaccgccgcggctacgcccaacagccttgcatggagccccttttcaatgtaatacatggggcctccgtaatagcttccgtccgcacctttttgacgaaacaccagtcccaacacaatttcagcatactttgtggccatgcctaaaaatgcagctgcccacatccagaacaatgcgcccggtcctcctccaatcaatgcagtggcgacaccaacaatatttccgcttcccacacagctggctatcgccatataaagcgcctggatagaggatacggttcccttatggtcccgggtaccctctgttttctctttttttggacataattcctttatgatccaggggatggacctgaactggattccgcccgtggcaatggtgtaaaacactcccagccccagcagcacaaacaacatccagttcccccacagcaggccggccagattccccagtactgcctctgctgttttcatcacttcaaccggttccttccctccgcctgcggcatatcaaatcccatgacagatgccagtgtaggcgctatatcaatcagattcatggaccctatgtcgcattttcgttctatcccgcatccctcaatcatgaaggatgccctcatctcctcaaatcgttcacaataaccatgctgggctttctgatgcagtgtttccgtacagtaatccccttctgcgtcatcccgtatttcatatcccttccgggaaaccagcacatagtcagccagtgggaaacctcccctctctatggcctgcgcccggtccaacacctccaggattccaaaaaccggatcggatgacagctccttcattatctgatccagctttcttcttgcatcctcatcctgtccattctttagccggatttcagacatcccccccgcgcgctgggaccaggccctccagtccgtcaccctgccgttcccatctgtagtgataagccctgcttccctcagctttacgttgggccggatattataccggttatccagtgtcccatggtcggataccacacagacaacggcctggtcatctgtcatactatgtaccttttcaatcagatcccccagcattttgtcaatggcctcaattgcatgtgctgcctctttgctgtacactccgtactggtgggccatctcgtcaaaggatgcaaaataggcggtcatgaagaaaggacatttcccagcctttggcgctagtttatggtccaatacccacatagctgcccggtatctctgcctgtcccctgcttccgtcaggtccagcccccctgcgtaccttccaatctccttttccatctccagaatcatgccctggggcacggacatggcatcaataaaacggctgtcaagctccgtgccgtcccaccagaattcaggtgccataaagtctcctccggcagccacagaagtgggaaaggccacgctggcagacaaatatccatgttttccggcagcctcccacaaattttccgcctttttgctggcaaaccagtgccatgcccccatatgttcccccatagggtcaaaaataccattgttataaataccatgggtggctggattagttcccgttatgatgctctgatgacagggatacgtaaaggtagggaacacactctgaactcccccgcctgcaaatgtaccattctccacaaaatatttgcttatattaggaagactgattcccagacgctcctgttcaaaaacaaactccggttttaacgcgtccacggataccagcaatacgcttaccttatttctctccatatcctttatcccccttagttttccggtttctcaacagatatgcctgcctgctcaaacggccgtatctgctccttcgatgcctcggaatcagtaataatcatccccacccggtcaatatcacacatcttcaccagggaattcacccccagcttggtactgtccgcaatgacaatggtctggtctgacgcttccatcatcttttcctgcacgataatttcatccatgcgctggtaagtgatccccctgtctaccgagataccgcaggtggtcaggaaaaatgtgtttatacttaatttagaaaatatcatgccggcaatatcagacacaaaagccatctcctcagggcggtacacacccccggtggcaatgagagtgattccctttgcatcggccagctcatttaatatggcgatggaattggtaacgactgtcagggaacggaatgtcctctttatgacacgggccagctcataggcagtggttcccgaatccagcgcaatggattggccctctttaataaagcggaccgcaaactctgcaatctccaccttgctctccagattctctctctccctggccgaaaaattctgatattggatggtccgctccccgggcatctcttccttgtcagctaaaaaagcccctcctctcgtacgccgtatcagtccctgagcctccatgttttccaaatccctgcggactgtttcgggagaaacccccatcttcttctttaaatccgcaaccttaacgcttccgtccgtctgcatcaggtttattatcttttggtaccgttgttccgccagcatccgcaaacgctcctttcttccccttaattagcttgtttgtactttttttaactacttttaactcataatagcacacacaagcacactattcaaccctttttctccgcaaaatatcacaaaatcgcttatttattttcgtataaattccacaatttaactcattttagctcatattaacttgacttagcttattttaccacatatactgtgtgtacggaaacaaccaaacacaatagaataaaaagtaaaatcaggagatgaaaaaatgaaaacaattgcagacaaccgtcaatcaaaaaagtggatttcatttggaacattggtgctgggtgccggaaccatttataagctggggtgtttaaaggatgctttttatgttcccatgcaggaatttatgggactcacacacacacagataggtacagccatgagtgtggccggactgatttccactttcggctttctgatctccatctatctcacggaccgggtgtctaaaaaggtcatgattcccatgtcgcttatgggcatcggtttactgggcatcggcctttctaccttcccgccctactggctctttctgttaatcaactgcggcctcgccgtctgtgcggacatgctctactggcccaccatgttaaagacggtccgtcttttgggttcagaagaagaacagggccgtatgttcggtatcatggaagccggacggggacttgtggatacagtcattgcctttggcgccctgggcgtcttcgcactgctcggaagcaatgccgccagcctgaaggctgccatccttttttactcagcagtccccatggtaatcggcatcatcgcttatttccttcttgagccggacgagataaaggctgtcaatgctgccggagaaaaagtgagccgaaacaaggcagctatggataatgtaattctggcccttaaaaacaagaacatctggctggtatcatttaatgttttttcggtctattgtgtttactgcggacttacatattttattcccttcctcaaagacctgtatgcgatacctgctgttttggttggcgcttatggaatcatcaaccaatatgccctgaaaatgctgggcggtcctgtgggcggctacctgaccgataaggtattccattccgccacaaaatatctgcgcgtggtatttgttattacaggaacagccctgactgtctttgcgttccttccccacagccatatgaatgtatatttcggcatgctcatgaccctcagcatcggtgcctgtgtattcagcatgcgggccatattcttcgctcccatggatgagattaacgtacccagggaaataaccggctccgccatgtcacttggttccttcatcggttatctgcccggcgcattcctctactccatctatgggagtatcctggaccacaatcccggcctcagcggctaccgcattgtattccttatcatggccgtgtccgccggcgccggattcctgctgagcagttacatattaagtgtgattggtaaggataaggccatcaataattaattcctttaacggccagcactccctcggataccccgaatacaatgttcggggttccgtcttttttaaggacgaatccggccatgctgggtgaaagcgtttcatctcccgccgcctccactgccgccgccaattccggtgtgaatatgcggtctgttcccaaggcagccagttcttccggtgaccccgccgaaacgccgccgtccttaaatcccacatacaaaggataggaggccagggaggccaatgcatccatatcccggtctgcaacagcctcttttacctttccggcaaaagcagttatctcttcttccggcaccatgaaattatccgtatagccggttttttctgccatgttccctgttttgtctatctcaaactccagttttccataagctccgggagcaatctcatatttatcaaacacaataaccggattttccttctcattcatgtaaaacacggttttatccgtgactcctgtaaacccgccctctgacttggaccagaaagcgatgccttccttctcctccatattttccatctggcggagtatgctttcatccgcaatcctggcatagtcatggcccaggacatctgccagcgtaaccattttattatcctttaaatcaatattgtaatattttgtttcactgtaggccgaggaccagttctcagttccctgtaccgcaaaggaaagatacgcctctgtctgggccttgatttcatatcccacatgaatgttaatatcatgtgcttcccactcctcctctgttcctccagtttccataaacgccttcttatattccctggcgcgttccactgcctcgtctgcatactggctgcataaatcgtatatttcctgattcaatgcagaatccagcccatttgtatcctttgctatcatctccacgctgggaatttccaccgatattttccagtccccttcatccctctcgtaagaccggaaggtaagaatccgcgccgctgctcctatgacagggagtcctgccgccatttccgcaaaagctgtgtttgtgtttaacgccgtagtaaataccagtacaagggctgctgccatacctgcacatgttccccatatcctgtgttttctgcgtatcctgaccgttggtattctttgcctctgacttttccgcttttcctctgaccggacaattgctgccctgacccgcccggacagttccgcgggaataggtatctcctcatatctttttcttgcatcttctatctgtctcataagtccgcctcctgtatattttgttttaacagtttcaaaccgcggtataattttgccttcaccgtattcagattggtccttgttacgtaagctatttccttcagcgtcagctcctcgaaatagcggagctttatgatggtctgcacatcctcctccagccggtttaactgctcgtaaacatcgtactcatggttgtatccttcttcataatatggtatctcctgccccattccctcctctgtgggaatctccatcttctgtttcctgagcagcagcaggctctcatttacaagaatacggtaaaaccatgtttttacggcattttcatttctgatcgcctcatagtggtccaatgccttgcagacagcattctggacaatatccatggcgtcttcctggttatggacataactgtaggccagcctgtaaaatttctcctggttgctgacgatatagtccacaattctgttatataaatcttccttcatggggtttacatccctccttgcagtgttgtttcgcggcacatcatagcggtacatctttgctgctgatatatagattcttctttcgtcttaaaagttgcatatgattaagttttttaaccataaaatgcagtcagggcaggaatccgatgtttcaccgattcccgccccgcctggtacctggcatttactgccccattctgttttatgtccattcttaccggaatgccgccatatgtttcgacgccatccgcttcattggtttgactgagtacaggcagaccgccatagtcagtatatccgctgccggctgtgccagataaattcccgtgacacccattattccgggcaaaatcagtatgaatgggacataaaacagtccctggcgtatgacggacaggaataatccatatctggaagaaccaatggtttgaaatgtaattgtcatcatgtagcacagcccaaaagccggataaagggccacctgggaaatcaaaagcctgacaccgtaatcaatgacagccggattcctgttaaacagcataatcaacggcctggccagaagaatataggttcccgccaccagcacggtaagaatcagggatgtcctcaatgcaaagcgtacggactcatgaaaccgttcctccctgttggccccaaaggagtaggcggctaccggctgatatccctgcatgaaccccatgactacatagcatccaatcagcaccaggcgctgtaccacaccgtatgcggctataataaggtctgcgtctgtcatggactttgctgctatattagtaagggatgttgccgccgcaaggcagatctgtataacagctgtaggtataccgataagtgtgacggatttgattagagtccactggggtttaaaatattccctctttattttaatgatggaacgtccggataggtagaaccatcccaggataaaaaatgtgacaaactgtgagactgttgtggcaagggaagccccctccactcccattgcaaacccccagtcaaacataaagacagggtccagcaccacattaagagcagcacccgtcacaaccgcgatagatgagatctttacagatgactctgccctggccgcgcagttcatactctgggcgggaagattggcaagggccgccacaaacatccagaatgcgtaatccccggcctggggaagcacagcttcggaggctccgaaggcccgcagtaaaggctccatgaaaatgatacctgccgcacatagaaacattccaatgaatacagataacccaaccacggatgtgaccgtcctgttagcccccatcttatcgcccgctcccagttgtctgccagccagcaccgctgcccctgccgcaaaaatattttccactgaaaccatgatgagcagcagcggaagggtaacgcctacagctgcaagcgcaatatctgaaccaagcattccgatgtaagctgtatccacaatattgtagacggcctttgccaataaggccagggtggccggaactgccagcctagtaatggccctggagggcttcatatcacccagtatggaatcctgacgtgcgttttctttcttcatatgtccacatcctttcgttccaccacaccatggagaagcacatccaatgctctcctgcaatcctcttcatgtgtcttgaaatcaatctccctctccccggatgtctgatactttgcattgatataatcctgaaactgcaggaatatatccaccaccgtttcccgtgacaccccgcccctgagcttaagaggctccaatatccggttcaatatagatatattaaattcatcgaacccggatttgcgctgcctgacggctgattccagatgggccggcggcatgataaccgcctcgcagaaaatcctgcggtacatgggaaatgcctggaaaaattcaaacctggcatcaaaataaagctgcagctgtctgtggacggtttccccttccaatatcagcttttctctcagatattccgtcaaagccccaaaacatccatccacacaggccagatacagctcatccttggtctggaaataatggtaaatgattcccttggacacaccctcacagctgcatatattgttaacggaactggctccataaccttgttccgcgaattccttcagcgcgctctccataatccggtgttttgtctgttgatttttctcttcccgcttcatgaacattcccctccaaaattattgaccactcagtctatttatgattaggatatcacaaattgactaagtggtcaataatttaaatctgaaatatttataatctgctttccggtgcaaagaccgtcagtctaccaccgccccttccagggacatcacccgcagggaaaatcctgcccatgcctcatcatacagtattaccctggcgaaaaggcactctggagccgcctcacaagccgcagcagtattgcagctcatccatgctgttgtttttagcccagaagctgctcaaacgctgctgtctgcatcggacggtaatagtaatagccctgggcgatgtggcagccaatatcctggagtacttttacctgtacttgggtttccactccttcgcatacgacctccatccccagctccgaggccatgttcaccagattttcaatgacaatctgctcccgcggtccctgaagcccggcacatacaaagctgcggtccagtttgaggacatccgccctcagcctttgcagctgccccaaggaggaatatccggagccgaaatcatctatggcaatctgaaatccgcgcatcttcagttccgtcagggcggaggacacactctcaggtgcatcggcaatcgcactttcggtaatctccacttccagcagatgatggggaacctggaaccgatcagcaatttcagaaacctggccggcaaacccgtcatgtccgaaatgcatctgcgagaaattacatgagactgtaacagcgggacgtccctcatccagccatctgcgtactgtgcggcatacctgctcaaacatatgaaggtccactcggacaataagacccttcttttcaaaaaatggaatgaaggaccccggcataagaagcccctgttccgggtgattccagcgaaccagggcttcgcagcccacaatcctgcctgtatccatgtccacctttggctggtaatacgcctcaaattccccctgttccatcgcggaggccagccttccctccagcccctgttcaaacagggccttattccgcatctgctcatcatataggaagcagcttccgcctgccgctgtcttagcgctgcgcatggcatagttcgcaaagtcaagcatctgtttcatgtcgttagtctcgccggcatccgcctggtaaacaccaaaggataccgcgatctcataaggaatgattcccctctccccacgccacttgttcagcaccgcctggatatgcatcaaatcagcagcaagcgtttcccattgtttgtaatgcctgagcatcacgaagttatcagccgaaagcctggcgcagcactccctgtcctccattgatttctgtaagatactcccgaatgcgcgcaggacttcatccccctcctcaaagccaaaggtatcgtttatcagcttgaaacggtcaatgtcacaataaaccaccgcatatttccccgtcgccaggagttcctccgcccggacataaaaacggtttatattatccagacctgtcagctcatcccggtagagcaggtcctggatacggcgcttactgcgggaaatattaaacaggttgatgcatagcagcaggatgatgctgccggatacagctgccacaagccctgttatcaaccagatattctgatgtacaaacgcttccatggtaatgggacggacagaaacggagttgttcagcagcagggtatcaatctcttcattggacatatactggatatatttatccaatatggagaacaacctggggtcggcagatttggatacgccgatacagaggtcgtttgggtactgggtcagcgcagtgacatgaagcttttcatatttggggtcgctgattatgtaatttgccgtctgggtattggtataagttgcctgagcttttccatccaggactgcatcaaaacacgcctgtatagaatcgtaatattggatttccttttccggattgttttgggcgacatgttcagagagctgatacccctccggaagagccagcacctctatctccgttctttcagcctgggtaatcattgcactgggggtattcaggaaacgcagtgtggtgttcatatggttgcgctcatcccacagataatctccatccacaacggaaatggcatccgtctcccccagtttcactgcacgtaaggccgtggctgcagggcaggcttcaaactggaagtccagcccgctcttctctgcaatccgggcaaaaatatctgccataataccgtttaactcgccttcagcatctttatatgagaaaggggcaaacgaagggtcgtaagaaatatgtatcggctcatccgcagcctcgatgtattcaacttcttccttggttagtaccggaacctgattggagcttggtgagagatacttgtcataaaggtccgtccgataatcaggattgcgcagaagaatgtcattaatggaccggttaatctgagccaaaaggtccggacgctgtttcgagaccgcaatgtacattggggtcggggcaaaccgcgcaacactgcggaacacactgctgcggcccaggtgggtaattgccacaccatccagggtcccgctcccaagcgcgtccagcagttcctgcgtctcatcatattcaatgatggtgagcgcaacgccgttctgcgcacagtagcgtttgaaactttcgccatcctcaccccccttaataatgcctaccctcatgccctggaaagcgtcaaaatcctcataattgtaacggttatcatccatccgcacattgagggtagtataaatcgtacacatggactcatcggtaaataacatctgatccattctgccttccgtgcggtatacagcaggcagaatgtctatcctgccatcaatcaaaagctggaacgcttcctgccagctgggggaatccactacctcgtaagatagtccactcagttttgagacttcctggaggaactcgaagttataaccttcatactccccctgcgcattatgatacatgtaatcgccatcttcataatagcctacaagcgcggcagaagccgtctccgctgcggatacgtccagagggaacaggaatacaatgagaagcacggctatcatcaatatcccattcatcccttttacctttgtctgcatatgaattccctcctcaacggctcggctccattattcatacaaactgcatctttcctttttgagctttaaggctattttaacacatataccggccaaacgcaatttgatgcatgttgaaaaaacctatataatataacgatgccagtatcggcacaatacatctttcaacaaatggctatgggaacacttttactcttaattatgaagatatctgccggggcgtttcacagatatccggttgttcctttttacttttctaaaaattattatgcagaaaactttgtttatgctataattttttattagggatttaaaaagattatttcgatatttgactataaaaggagaatattatggatttaaccagtcttcggtactttgtcgcattagcccggaatcttcatttcaccaaaacagcacaagaactgtatatttcccagcaaaatctgagtcagcatataaacaaactggaaactcactaccgtaccccattattctacagaaaaccaaagcttcaattgacgccagcgggcaaagccttgtatgactcatgcattaaaattctcacagaggaagataatatctcacggcaaatgaatgatatcattcaaaataatgtgggttctctttccatcggagcaagccagtaccgcggccagtactggcttccgctcattcttcctgactatctaaagtgctggccaaatataaatgtgcaggtcactatggaacggtcggaaaagatggaacagcttcttgtctcgggggacctggactttttcgtaggaatcaagcacggcgatgattccctgctccgatttattccgttaatgaatgacaaagtatatatggctatcacaagggagctgatggagcaatattttggtgaagagactgatacgattattacaaaatgcagcaatggcaccaccctgaaagaatttaaagaggtaccatttatgcggttgaaatccacttaccggctccgtatgctgactgacaagtgttttcaggccgtaggctataaaccacggcagattctggaagtggaatccatcgacctgatgatttctctgttcccatatagtctgggcgcctttttctgcacagggatgcgggttccatcgctcaaaacctcccatccaaacacttactttttcccggtacatctgaatggaaaaaccttgctcaatccactcggcattgtataccataaagaccgttttcttcccagatatgcacaggatttcatggagcggttaaaatctttttttgcatcatttgaaaattcttcctgttaattattaatataaaggaaaaacaaatggcgcccatataatataagcggcggcaaaaacagccgccgttggcagtcctgcttttatataatcgctgaaacggtattcacctgcttccataatcagcgcctggattccggccgccatcggagtagaaatagaaagcgtggcgcctgccactgtggcaaccataatggcagtgggattgattcctgttgtacaggccacagtagccgcaatgggcatcgtcagattgatcacaggtatattgcccataaactgcgtcatggcaaagggtacaagcaaaaaaatagcaaccagcacatattcactttggctggagtttgttgcgaaaaccagtttttctacaatccagtctgcaattccggttttggtcaacgcatttgcaaaacccagacttcccgcgaatatacacacagtatttaagtcaattgctccaaatgcttcttttccactcagcacgccgctgacaatcatcagcaatgcgccgatcagaggcgcatagtgtgacggaatccccaccagagaactgataatcattgcagcaatgctgccaaaaaagattccaattcccattttatccttaaattcagaaagattgcagttctcgttcaaaataatctcttcctgatttttgtccccattttctttttgatttgaaataaacttatagccaaataatccaataaaactgattgtcactatcaataccggcaatcttgcaatagctgaatcaaataaactcatacgaacagatgaccccatcatctgtaaatacgaatttccctgttccataaaagctgctcccattccaaatggcataattgcgaaacccatacaagctgcgtccataacaggcttcagcaaacgtcttttctgaaaattccctttcctgctaagcagggataccattggaagcattgttgcccccgctgctgtggcactggtcagcattgcaagaaaagaggcaatatacatacaaatccatctcattttcttctcactgctgccaattttctgaagaagcttctgtatctttataataaaacttgttttcataagtccggcgcctaaaatgaaaatcgaagcaaacagaaaaaccgttgtgtttccaaatcccgcccaggcttctgctgatgacagtatccccgtaatctctaatgcaagacagcaaaaaaccgctgtcattccataaggaatttttgcccagatataactaataagcataaaaaatcctattaataatgtaacctgaatatcccccatttttctcctccctattatagtttcgatttttgcttttatattttaaatttttccttatatattttagatttttccttatacagaacatgcagacactccgctttttcaaagccgaatgtctgctctttcatctcagttattaataatcatacatacccaccggttttctgtccggcttaatcgtatcagtatatacgggagctgtttcataatcaatatccggtataggccaggttggctcttttccttcatacatctccacaattcccattgcagccatgtaagaagcccgcattgccgcttccaccgtattgccgccaacatgcggagtaatcagcacattatccagagtgatcagcggcatatccggaagaatgggttcgtgcacaacagcgtccagcgcagcgcctgctattacatgattcttacaggcctcatataaatcctgttcattgaccaccgcgcctcttgctgtattaatcaggaatgcggtgggcttcatcatcgagagtgtttctttattaatcatatttcttgtaacagaggtatttggcgtatgtaaagatacataatcactttctctgaaaatacgttctatatctctgaccacttcaaccccctccgggaaatcacatgccggcttatatggatcatagcaaagcacattcatctccattgccaggcagcgtttcgccgtgcggcttccgatatttccacatccaatcaaaccaacagtctttccgttcagcgtagtcatatatgttttcagttttgcatcgtaaaaatccactgttaacatatcgcgaagacgtgttacatttctgctcatatacagcatcagcataagagctgtctccgcaactgatgtgctgttcgcaaccggagcgtaaaggcatttcactccataatccgctgccgcttttaagtccacagcgtcatatccggccccatggcgtaccagaactttgagattcggtgcagctgcttcaaatacagctctgggcattttcgtaattcgtacgataatggcgtccggcttatgctctttcatgtccgcaattacatcttccgtttcaaatccgcggccgtcaatcaacgtatgtccatggctttccagcaaatcgcgtgcatctttttttaattcctgtggtaaaagaattttccaacccataatttcttcctctcatttcatgattcttcattattcttagcaaatgcccatgattttccaatacggaagtccgataataaggaataccgcaaaaatcatagctaataaaatggttcctttcagataccagtctttctggctcacataaccatttccaaaaatatagatacttgcaccgtttccgtagttgcacaaaagcgcgccatatccgccgaaaaacgccagcatcaaagacaatgccattatatttacatttgtggatgccgccaatgtcaaaataaccgggtaaatagaggcgatataggctgcattggacacgaagaagtactttgtaacaaaacttattaacagcagaatcactaatacagccattccattcacagctgagagatccagataattttgtatctggccagacagccaggaataaaatcctccttcattaattgcgccggatatactgaaaaatgcaccgtaccatatgtacatgttccatgcacccttttccgccatcaagtcattccaatccatgaccccaagcagcagctccaatgccagaaaagcaaatgcaaccacatacatactgattccaatttttcccccgagcatccatcccagaatcgccatgataaataatgccagcagaattttctcgtcttttttcattgcgcccatttcctgcattttactgacaacaaagggtttaatatctcccaaatctttcatctggggcggatagagcttatacacaaccagcgggcacaaaaacaaaacaatcagtcccggcaccaatgccgccttaaaccacagcatccatgtcaattccactccggcaatgtctttaatggttgaggcaatcactgcattggatgccattcctgtcagaaacaatactgctgtggacatggccactacatgttccagcagctccagatatcctcccagcttttgcggatccttgtccggataagaacccagtgactctgagacgccccggaaaataggaaatacaatggcagaacgggacgtattggacccggtggccggactcagtattaaatcacaaagcatcatgacatatccaagacccagagaggatcttccgaatttggttaccccaaatttggaaagcaatatgtatgcaagacgttttcctaatccggttttcttaaacgccccgcaggcaagaagcactgcaagcaaaaaccaaactccctgggcagcatatccgctgtacaaaacagctggtttttcaacaaagcaggccccaagtcccaatacaatcaggctgattaccggctctgaaaaaggtttcaaaattaatccgcacagcagggacagacacagaccgaacatatgccaggtctctgtctccaggcctgcaggagcagagataagccatgtcaggagcggaaacaaaactaccggtatcatttttaccagacgatttttcatctgtttctcctcctcttttagcagttataaacgtcatctataatctctacatttttcttttccatcaaatcttctacccactggcggttcacagtcccttttgcagaattctccgctttctgtttatctgccgctgagagtgtcctggctttttcaagaatctctgccgcatcctgtctcggaataacgattacgccgtctttatcgcccagaataatatctccggggtttacagtaatgctgccgcacgcaatcggaacatttacctcgccaggaccttctttataagggccggccggattcgttccagttgcataaatcggcagatgcccttttgaaatcacatcaatatcccgaatcggcccatcaatcacaattccggcaatttttttgaatccctgcatgtaattatacatgatttctcccataatcgcccggctccgctcgccctcgttggaaacaacaatcacatcgcccggcatagacatattcattgccttatgaagcatcatattgtcaccaggccttgccttcaccgttaaagccacaccgcacataattgcttcagacgggtttgacatcagtctgatactgggattcatgccgcataaccgtcccatacaatctgctacatttgctgccggtaatttgctgaattcttctactaaatagttatccggtaaatttctctttaaaaaaacacgatttccaactgccatttccttctcctcctttatcaatgcgtttccaggcaaagtgttgttcctgcctgaacaaaatggatatccgcatccatcatatccgcataatataaaatcattccttcaattgatctgggaatcacctttgactgtccggaatgagcaaccaccagccctgtaacctcattaggaagcccgtatttttgtgtataataaccgctcaaaaatccgtgctggtaaatcttacccagactgctcttcctgctcgttttgcttccctggtcacccatctccatttcttcaagcttacatacatcatgcaaaaccgcagcaaggattaaaatatcagtatcaatctcataaccatatttttcaacggtatttcgcgcaatcataagcgcattcgctgtaacactttccgtatgcttcaccagtgccactccaggagcacgggttgcaaactgcgcgtccgctatatcttcccatgagctgttttcaaatgcttccacccagatttcagctgccttttttgcatattcctgattttttatctctgataattggggaaaatatgatctaaccatctcttctgttattttggtcatattgaacctccttctgtttcatttaaaatattcagcatgctttttattttctgatatcattatatattcttttttaacaacagtaaaacaaggttatatttatttttgacaacaaatcgttgtaaagaatatggatttatggtggttttttattgtatatattgtgcaggtttgatggattatatggcggagattaaggaatgataataaaagaaatgcctgccagcgaatatgtagtgtttcatttcggggctaaaatgccaagacagtttagagccagttgccgattacatttattaaatagggtttccgcaattgacttgtcagttaaatgaatccgcaacatatgtttttgcaaagcatggtgaggaagtgggtgaagaagggaaaagcaaaatagagtactgggttccgattttacagacagcaaggtctgtaaacattgaaacgaaaaatgaccgccacgttagcgacggccaagtaaataattactcattatgatagattgtatttcctttttatctcaactatttttcacctgtccgccttttctcttggtatagcttaaatgagattctttctaaggtagacaatcatacttttgtctacctcagctttgatactaatgtatcataaaagatttccacattaatgggctttgccaaatgtccattcatcccggcagccaatgcatgttccacatcctctttaaatgcattagctgtcattgctatgacaggcacacgttcagcatcaggatggctactggcacgcaattgctttgttgcttcataaccgtctataacaggcatttgtatatccattaaaattaaatcgtaatagccaccaggggatgcaaggaatatatccagcgcctcttttccattttcagcacagtctatctcggcaccagtcaccttaaggatttccatggcaatttctctgtttagtatattatcttctaccagcagaaaatgtctgcccggaaactccggaggaatgaactgagatatctgttctggctcctgcgaaagtatattctttgtcagcgatactaatatgtcataaaggcttgattcaaacaacggttttaagataaacgcatttgctccgtctgaccttgctttgtcctcaatttcagcccaattgtaggtagagattataatgtctggtttcttcggaccaattttttcgcgaatacagcgtattacctctataccatccacatttgacattttccaatcaatcatgcagatatcataatcctgtaatgctttgtgggcattaaacaccctctgtaaagcctcatgtccttcacttacacagtctgcatgaatacccattctattcagaagcatggaagcataattacagttgtcctcatcggggtctgcaaccagcactttgagaggctcccattcccattttttatgttttccttcgtttggtacatcgacaggcagaacaaccgtacaggtagttccttcacccagtttgctttcaacctgtatggaaccgcccagtaatttaaccagattataagtaatagccatcccaagacctgttccgccatattttcgggaagtgccgctgtcggcctgctcaaatggtttaaatatacgtttcaggtattcatcgctcataccaatccctgtatctttggttatgaactggagatgggtttttccatcaacaacaggtgctgggtttacttccagatgaaccacaccgccttttggagtgaatttaattgaattggagaggagattaaggagaatctggttgatacgcatacaatccccaatatacactgcttccggaatgttttttataccacattcaaatttcaatccctgctcttctgcttgggcataaatggtagctacaagcggttccagcaactgttgtagttgaaaaggttcgtggtttacggagagttttccttcttctatcttagacatatccaacacatcgttgataattgtcatcagatgtcgggaagaaaatgtaattttagaaagacagtcctctatcctgttggaatcatccaaatgtgtagccgctatttttgtcattccaatgattatactcaagggggtacggatttcatgggacatacatgatagaaactctttctttactttgaaggctttttgcgcgttattaagtgcatcctttaactcctgctcctggatagataaaagttttaaattttttttatccatatattcggaatatatactcagtaatataataccgattgaaagcagtaaggagactgacacggtaagtactgcggtgtgttttgatgtttccgtcaactcacagaccttatcatcagcaaaatctattattgttgttaaacagtcactaaccctgtcatactgaggatatacatacagagctaaatagtttgagatctcgttctcggtatgtccaaccacaaagtctacggctttatcctgctgggcaatcagctgattcatggcagcctgaagggtgtccacatcctccttagggccggaataacagctataaagcctctctatatcactgaactgcaaatcataccgttcctgaaaaatcgaacgaacattttgctcccccttaaaatcataggtcaggaatatactcacaaaacgtttcatatccaacaagcgtgacctcatccccctggcactgttgctggatgtatagggatggtcatatatattttgggctgtttcctgcatcctattggcagtatatatactgatggatgcaaatattatagtgacggcacagataataattgttatttttgactttatttctaagttcatacgcttccctttaaccttccaaagttcatcttctgcacatttttctgaactcaaaagaagtcctgcggatgtgcttttccatgcccatcatttattcgtttttctggatatctgttaacattagtgcacgctgatacctgccagttaagtcttacaggatttcgataccaaacgcgcttcgctattttccagtttaaaactatcaactaaattttttaatgcctgagcctgcctggctagttcttcgctagcaccagcactttcctcagaagttgcagtattagtctgtaccacataggaaatctgtctaataccctgtgttacctgggtcagagaggaagcctgtcgactggcggcatcggcaatgtcatccaccgtgcaagatactgtctgcgtattttgggctacttgttcaagggattgggcagttttgtcagcgattttacgccctgtttctaccgcctgaagggaaccttctatcaggactgcagtatttttcgaggcccttgctgactgctcagcaagattccgcacttcagatgccactacagaaaatccttttccaacagcaccagcacgtgcagcttccaccgaagcattaagtgccaatatgttagtttgaaaagcaatatcttcaatcacttttattatttttttgatttcggacgacttatggctgatatctttcattgcattaaccatttcctgcatctgatgcatgcaatcgttaacagatccgcctgcctgcatcgtctgctcgcgggccttttccacattcgatgccgtctcctgtacctgctctgatattacagaaatagagtttgccaattcctcgacagaacatgcctgttctgctgccccctgtgccagagtctgcgagctggcagaaatctgttctcctcctgctgccacctgaaacgcagcctggttaataagttgaagcatatcgcttaaattattacggagatttcgcattgagattagaatcccttcataatttcccatataagcttctaaggcattggaacaggttgtgaagtccccttttgacaaatctcccattatatgggcgatatcaaaaattattttcttttgtataccaattaagtagcgtatattattggataagtcacccacctcatcctttgatatatatttgacttgtgctgtttccagttctcctctagctaacttttggattgccatttctatttcctttataggcttacggacggtgttcgatatatatagtccaattgttcccgccaatataaaacttaggataataatgactgttacaagggtgatagacatttcctgagctttttgaccatcctgtaccattttctttgcattttctcctgcaatatcggctatcgcctgcaatttatccgccatttgattcaaatgcggtacataaccattcttcattatgtcgaacgctttatctttcttattagccagtattgcgtcaaacacctggttgcgataaacaatcgcttctttttgaattgattccacttcatctatcagtgatttatcaccccgaaagacttgacgtatgataggaaacgtttcacgcatcattataaggctattgtcagcattctcaatcaactcttttgagatttcctgatctgattccacaatagcccttaatatatcacctcttgcctcttgtattttccttcgggctgtggctacattgactgtcacagtatagttgttgtcatagaaaatggttaaattatcgccgatgtgattaagcataatcagggccacaatacttgcacacaggcaaagaaatatgataactacatatgacaataaaagcctggttctgattttcaaatttttcaacattatattctccctatagccaataataattttggatagttatattgatatatagcaagcacggtaaccttgacgtattgcaccttgtttatatacatatttataagaatagcataaaatacaaaaaacagcaaccagcttatagataccgactgcaaaatgagtagaaatttctttttttcaatgttatactgatttaagtaatgagtttttaaatttcgcctaccaggaggtatccttttgaaagaacaactagaattaaatcaactcatttacagcataattaaaacccagattgaatttggaacttatcgctttgaggaacatctaccgcccatagaagagatggcggacatactggttgtatctgtagataccatacggcttgcttatcgccgattgcagacagatgggtatattaccctttcaaaacgtattggttctgtagttacagttcaatacgatgataaagaagtagaacagaatattcagacttattttgcagaacgagctgactctctgctcgatatatgccgttcaatcccgctgctgctaagaggtattcaggtatcaacatggaaaagtattccactggaagaattagataagattgaacttgatgccttacagactaaacctgccttttgggtgttgttttatatacagaccctatatagaacgctgaataatgacctattaatgaattttttcctttggttgaataccttttatacattaccttttttgagtctgactgattatgaaaaatatgtagacagagacatctgtgccataccagatataataaaattccgccgggaggaaaattggacggcacttcaggtcatttccaaaaatgtccttgagaaacaccagtccaatataagcagtttttataaaactagaatttctgttcctccctcaaaaaaccaaatcacatttacttggagttgttacaaaagagcatcgcagatttgttattctgtgggaatggatattttaacttcaattgcccgtgaatattaccctgtaggaagttttttaccttcccaaaaaaaactcgcaaaggaaaaacatgtctctgtcagtacaatccgccaaaccctctcattattaaataatctcggtattgtaaagactatcaatggagtcggcacgcaggttctttcgatggatcagattgcagacaactgtaatttagcgaatccaattgtaaggaaacgcttattagactgtaagcaaagcttgcaactctttgcgttgtcctgccgagatgttgcatcatttacgatttcctccatggatgaatcaagtctgacgatatggatggaacagctcattttattcgaacaattagacaaactggcgcttatagtaccgttttctttgaaattcatgagccagtccgcaccttatcagacaatcagaacattctactcagaattatacaagcaattattttggggagtcccgcttagaggtatgatgggaacacaggaagttatcaatgatatttaccgaccatatcatcaatctatgcttaattatctaaaaagttccgatgcagagggatttgctgcaatattggaagaggcatcaaacctggcagttcaatttgtatctgaacggctagccaaatatgggatacaggagactgatagtaagtctatcactaaatatggaaagaattctatctagtataaacgattatagttagctttttgtcatggttccaaaacattaacttttatatactataaaaatagaggttctgtactaaatattggtgtgtgttgaaaagcacatctccaatatccctttggttgtaatgaaatctccggaaatgtttatcccatcagaaacagcaatatcttttcccactcctggactggcgtaattcattctttccggcctttggctatgagcccctcagttccccggcatgtggcacttctatgttggttttaaaagtttactgatttacgaaatttctttatcggcctcatcctccccggatactcccattgccagcagcatcagcatgacaggtgtcacgataggaacgctgatgttgactgctgcctgggcagcataacagattacggcaaaggcaattgccattacatagggccgttttccggataaacgaatcattttccggatggatgtaaccagtaatgccagataggccacaagtccggccaaaccaaccgtcaccagatattgaagatattcattatgagcgctgtcaaaaaattccccatagcgcattaccatttcatcataatggttttccatgacaaccgccccatatgtatccggtcctgcaccaaatattttctgtttaaagggaaacttcccataactttccataccgattctccatatgtaccaacgatgcgttccccagtcgtcattgatcgtcaggtactgtgccaatccgccgtagttccctgcatttccacagacattcacatcataaagggcaaagccggtcaggataattcccacggacaggaatgccagccaggcccacctccccttgtttccatcccgcataaggggatgggtgtccggaatcattttcatcatccaacacagtatgaagtacagggcccacaggactgccaccagaagaatcaggtaatgtgaaccggttatgatacggtacaatcctcccatttgaccggcagctcctgattgcggctttgtcatcctgtgcaagctccagaattccgaacttaacactgccagtataaaaatgtaggttctgacccccctcaggtttttgaatgcatacagcggtaaaagcccaatcagagcaaagattgcaaggtaggcattatcactcatcccggtaataagggcagcgaatgaaatcgacatgcagaaaagataccatgttttccttatccggacctcctctgtaaagaacaacaggacagacgctccggccagcatggctgcataggatgtatatgtattaatgttgccaatggttgacgtaaacatatagtattgtccagggtccataagattcttaaatccaataggatctatatcgaagtattggaggattcctatgatacacgcccccatgccggctccgagaaacaggtccagataccattgtcttaaacgcagactccttcttacggcaaaatacataaaagcataagcaatccatatcagaagaccagaataccttccatcatttcccaacaatgctgctgcgggagttgcggattgcagagtggatataccggctatcagtataaaatccagcatggaccagtcagaggcgcagattttccttctcctgcccgtactcctgtcacagcccagatagattgacaaaattaaaaaaattacatttaccatcagaaatacaactgcaaagataatcactactttgtaataaaaaaatgttttaaaattcagtatatcaaagtaatagtccctgaacgcaaggggaaacacccctattataatgatcgcaaaaatacctgccagtccggaattcatccctcgccattttgaataaaaacttttaatatttgcaatactggttttcttcccactatccatgactcccccctttcaggtaattccagaagcagccatgactgataccatggctgcctccgttactccttcttttttacatctttaaatccttatttatccgtttttggcacatataggtatttgcctcctccaacattctcatcagctccagcgcactgcgaaaagcaatataatgcgtccctgtataattgcaccggagcctcccctgcatagaggaattctgccggaacaacacatggatcagaatgacctccttcgcagctgttacatatgggtacaggttccctgccacttcctctttttccagaactttcccggaacttttttgccgtttccccctcagcgccctgtactgctgctccctttctttttgcaggaaccgcggttcggttgttgccataggggcccccaccatttcacacacctcatcaagggccagtatcagcccgtggattcctctaaagcttacgggacaaggcagatgataatttacaatgataccatatggcatattattttcatgaccgtttatacacacaagcatcatacacgccctgtccgtacctgccatttcaatctgaaggttcctttcctcactcagcatggtccactcctttgcagtacaaccgcagacattgttttggaactttattcgccgtttttacggtgtctccctcatccatctgccgttttcatccaccatatatccatcaggggttatttcatttacatataatgtacccatcggctttccgctctggcttccggtactgaagaaataccagtactcgcccagcttctgccatcctgttgccatacctccggtaaactgattcagatagtaccacttcatatcctttgcgtcatagtaccagcccatgactaaacgtccaaagtcagccccctggtcctctttaagataataccagtgtccgcccgcgtccatgtaccatccgtaatccatgataccggctgcgttaaaatgataggtacaggtctgccgggcatccttgtacttgatgtttatccattggtctttgatgattcttccgctcctcagtataaatgaccattgtctgccatccgtgtcaatgctttcccatcgcccttccgtaccaatggtgtatgttctgtaatcgttaaaggtatttcccggtccaagacttctgcccccgccggaacccccccgtgagccgccgccggaacccccaccggaacccccgccggaacccccgccggaacccccgccggaacccccgccgcctggttggttgggattgtccgggtcatctggattgttgccgccggaagtaatggagtccacaagggcttttaaagtgtcataggcttccaaaagctcatcaacagtcgggcggtagattctgttggcaacctccagggcaatgtcaattgcttcgcttaactcctccctgtcctcttcacttaccgactgattgttcttcaatacctgggcaatggaaatctggtctaatagcttctgtcttgcttcctgccactgcgcatcatcttccgtctggtagagtacatgcagggtcaggttctttgtaaccggctcgcctgtgtcataaccgttacccgaagaggcagtctttcccagccccttatactcccatacaattccggtaatcggatccgtatagtcctcaaatatatccagatccatgaatccttccgcgtcctccagggctgtgtcggacctgaccttaattatatgttccatggaacgtttatcgtcaatgatttttacctcatgggctttcaggtaggtcagtacataggtgctttccacgtttgcatcaaaggagacaactcctgtaaaaccggaatccatatcatccggagccggctccataggcacctctgtacatgtatattccccatccaaatcctccaagttccacagatggtaatccgtatagccgtgcatactgcggtcaaggacagcgtacaccctgatatccggttctttattcacatcggacggaatctccttattgctgccgcccacctgtcttgccagtacagacgataatgtccagggtacctttaccgaatcattgccgacttcagattttaccgcttcggactccgatgccttgggcgcgcgctgggtgaacttgactgtgtaaagtacgtcaacccctgctgtcatagcatcctggtcactgctgttattagtcagttcatcaattaaatcctccatcctgtcatctgacaggtcaagggccacagcccctgtcttaggggtataatcaatagaagcattgccgggtgttgctgccgccgcagcataatagttcgcctgaagcaccagattcccttccggcatggtgatagcagggtttctcctggtcttatcggccagtgtcagcttgccaatcagcgcgctccactgccggaacccctgcccctggctgttggtggtttcagcatccaatgaaattacatccccggcctttaccactgctgttttatcatcatcaaagtcaattatggctccgtcacgcatgattttagtgataaaaccgccgtttgtcagggctatggtataatcctgctgttcctgcgtatttcctataaccgcaacctgcgtacctaaaagaatcttatcggcagcggccgtgtcctctcccggctgttttgcaaccaccacatacagctggtttgactccagtcctccaagtaccgcacgaggtgatgcgccggaagacatgacccatccgtcctcatcggccccgggtacatctattacatcgccctccatgttaaggattgcatacagggtttccggatttgcaggctcaaccaccacctgcttcataccagccccatcatcttccacatcatagttggtgccgagagcgggcactgtcacacgtgaaggcgggctgaaggtatccgggtccagatgttccggaaggattacgcctatatccgggttagcgctctggttaagctcatagacatagtagcttgtacatggatttaatccggtaaacccagtgttttttaactggcttcccagtttggttccaaccaccctgtaatccatatcagtcaatgcgtatctgcggttttcattggcgccggatacgctcactttcccgcttccatcgctgtctacggtcccccgggcatccggcattgccaatatgttgtcatcactgattccaatagggataaaccttgcagtataggtctggtctgcattgattgtctgtgcattctgcatccggtttccattctcgtcaaaccagccgccaaacatatagaaattatcaggcagggtgctgggaagtgccagggatgaccaggatgtccctatttccacatggcttgtcctgctcccctcaatggtaccgtggggaccggagacaaatttcagatcaaaccattctccttctgtttcctcaaaattcgcgaacagtttaatggaggcattaattgcagtgtcatctgccagcttttgtcctgttttattacttccgttggatgtagccttgtaccagccgtcaaaactgtagtgaggtgacggagttggcatgagcccttccgttacctgggccagggtattgttttctgactttttaacaaacttaggggctgtatttccattaaaggagccattctgtccattgtagaattctacttttgcccaatatgtctcatccgtcagctcttcggtataggtgatagttacagttccaccctgaagatttggggtcaggttcagtttcttagtctcctggtccagggatacgtctgacagactgtcttcccatactatattaggaggataaacataacctgacattttatccacatcaacttccaccggtactcccggctgcacggcccgcgtctcctcttcacgcagtatattgccgtggttatccatgcgtttcacccgaagtgtggttacaaagctgggatccagttcatattgataggtaaatgttatggcctggttcggcatcttacccgtaaaatgatagttggaagtattgagactcacccctgcatcctcagcggatataacacccgtcccctccagatccgtaattccgccgtccgtcagttccgctgatgcaatcagataagaattaatggcagccggctcaataacataatcagattccaccggaagggttctgctctccggggctttaatctgattgccctccatatccacgtaccgtacagtaatcaggaatttttttgtcggatcaggttcataacggtaagccgctgtcagataatcattgggcatacttccccttaccgcattggtggaagcgttgatgcttgcccctccctctgtcatggtgccatgtccgcttgcttcgccgtatttgcggactttattattctttagaagcacggacttaaaccgatatcccggaatatcccttctgtatgttgcggagatgggattattggccatctgggtgctttcccaggttgattcaaagaattttcttaaatcaggatcatcataatcccccggccacccgctgctgtcatccgcctcatctctggctgtgttaaaatccctgtaatgttctaccctgaacgtatatggggtggtttcatttcccttccacaccgcgttgtaggttgttacggaatcatacgggaaagcataagggagtgtctccacccgattgccgctggttccataccagccgtcaaatgtatagccgtcccatgtaataccattaaaatccgggaccttcggccttgccccggaaccgaagtcatctgtgggcagtccggcaaagttggcagaactggtcagaggactcccagcgtgtccatctgccacaaacagatttccctccatagccccgccggatgccacgctgctataactggaaagctggactcccggaccgttttggggatcaaatttaagcttaaccggatccccaaaattaaccgcatacgccggatatcccggggcagccatggaaaataccatggctgccgccagcatccctgccagctttgattttatattatatctctttctcatccggttcctcctactgaatccatgcaccgtcggcgtctgtctggtatccgtccggtgttatttcgtttttatacatagaacctaaggggcgtcctgtacctcccccatagatccattgctgttttgcggggtcataggcatatacgcctgcccccaccggggagaaataataccattttccgtctatcttcctccacccctgggccatcacgccgttcaacggatccagataataccagttgccgtctcttgtatccagtctccagcctgtaaccatctttccataaggagattccttctctgtattgcagtaataccattttcctgccttatcacagatccagccgctctgcatgattcccttatcgtcaaagtaataccagccgctgtctcctgatcggcttccttccgggtatttcagcctggcccacatgccgctcaggcttgtgcctccgttgagaacaaaactcagctgtctctccccggacggacccgtgctttccacccagttaccgttggttcctatgaggtaactctccggcgcggttccggcaaaaggcgcctgtttgcttccgcctccgcctccgccgccgcccttgcttccgcctttgttgccgcctttctgctggtcgtcatagtggtcataacggttgtctaacagttccttgtatggttctgtcttgtccttcagttcaaaaagcgcctcctccagctggtcaatggtagccttgggttcctcgcggtccagtacttctaatgccgcttcaatgtattccttcagcttcttactctcaccaagcttcaggaaatggtcatcgcttatgccgatggcctcacggatagcctcttccagctccctgcgggtgttgtccacctctttttcattatcgtcatagtacgcatatatatatgtcttgcgggttatgctgcggtccggttcaaactccctgtaacggtcctggcggtagctccagcccacgtagctgtactctgcccctgccgggctgatgaaatagtcgagctgttcctcaatccccgcatactcggtctcataataggaatcaagaggggattcttctttgcgcaccttgaaccagtaccggtagatatccggagccgtattgttcaggaaatacagccggtaagcacggttatacaccatcacatacctgcttccctctgtggccgtgaacgtgaacaggccgcctgtctcttccggctcgtagtccatgggtacaaggcttaccgctattcccgtgtcatcgtcctcttcgatttcatacagctggtaatccatcatgtccacatcgcgcttccccagctgtacataggtgttaaaagatgcctccgacgcacttgcacggttgactttcctgccgttcacatatctctcaatggatacgtccagtccccaggccgccttataggctgcttcatggtccgtatcgtagtcgcctcccatcttgatggcattggattcggaagcgcgtacattgttctttctgtaaaccaccttataggtcacgtccgcatggttcacgtccatcagctcccggtccgcgtccgtggtcagttcgtcctccagaaccggtacctcgtccggatccagggccagctcctcacggctgccgccccggacttcatccaccacaacagcgttgctgggggttgccgcccgttcatataccgctgtcagcaccaagttggtgtccggcatggcaaagctggcttccctggagttaatcttggtatccattccatccaccgctccgatggtgaacttccagtgtaagaaaggacggccctcgtcattggttggttccgctttgattttcacccaatcgcctttgtgggcctcctcgtaacggtccgcgcccacttctatatcacctgcgctcaccacctcaccgtaaattgtctggatgatgtagttcggaagttccagatcccctcccgggtccgtagtgataatacttccattttcctcgcagctctccgccgtgatggtattctggccttttggccgggccaccaccgtatactccctgttgtaatccagtccgccaaagcttacgcttcccgggtttccggacacactctgccatccgcccgcgccggtttggggcgtcgccaccacatgtccgtcgctgtctaataccgcgtagtcggaggccgtgtccgcgggccgtataatcaactctgtcttgccctcgtcttcctcgtcatagagaatcttataattggtatccaccaccggcgtcagtacctctgcaccgtcactgagagtaccctgcacatcccctatcatgtctccggtccccaccccggtctgtccggtggcctcatacaccacatagcgcatgccgggatacaggttgtcaaatacagtgcggctggtgaggatgttgcccttgttcactgccagtacctttccgtccaggtccgtaagtatatatttataaccctgtgtggttccgaataccgtaatgcggccctttccctggccgttaagtcctgccgccggttcgggctccgctacctccgtgccgaagatagctggatccggatagaactggatggtataagtctggccgttcaccaggtccgtatcatcatccacaagctctccctgtacataccagtcatccaccaggtagttcacctccggcgtgtactccggaaggcttgcctcaatgtctccccacttcttatcgaatgtagtgcgcagggtaagaggctgccctgcattgatagaaccgtggctgcccgcctcaaaattaatatgaatccaggcatccggattttcctcaaaatgggcggttatgactgccgctgccgtaaaccggtaatcctgaggcaggagtgtctccccattgttcagaaccccgtccccgtctgtatcaacaaaccatccgccaaagcggtaataattattctccggctgcggtaccggcataagccgtttttccttgatggtttccagggtataggagttctcatgccccggggatacgccatcgtccaacagcacgctggccttgaaccttccgcccgacagggcctgcacatcctgggatactccgcttccgccctgcagggttccgttaacgccaggcttataagtaatatccgcccacttagatggaatcctgtcatgcctatacgtaattgtggcgtcatcgttgggcatgattcccgcccatccgctgtcatcaaactgtatctgtgtaccggcaggccggaccgtatgggattccaggctgtaaccatactgctccagatagtcgccctccacactgctgtccgcctcgaaagggcctgatacttcaggagggatgatatcttttaagctgctgtcagccgttccgttatcctcatatttaacagttatcccatatccctcgatggttgattcatacaggtagacaagacgcaccggctggttgggcatgataccgttaaacgtaaagctgtcatcaaactctcctctcacaccattcaccagtccgtccgccaattcacccgcctcttctcccaggtcaaaccggtagccggtacactggtagccgtaaacctgcgccggctgtgcactgatctcattctccggataatacagttcagactgcgcagtggataccgtggtaccattattggtctgatgcagtacctcaaatagggatctggcgcttgtatccccataccgtactttgtaaccgtaccgtatggtcgcatcctgtcccggcatctttccgctgaatgtacccgtaccgttaaactggccgatgggaacagatgtgccgctgaaattgtattcagacggagtggtgctggaatcctcctggctccaggaataccccctgaccgcccttttctcttccagaagcggctgctccacactgtaggcgccttccagagtgttggaagcgaacataatatcgcccgatgcattagagtgctctaccgtatagttaaactttatacttgggtccgcctcaaatatggcatagtaggttacaggtgtctccgggtacaccggcggcaggctgcttatgaactgggggtgctcccagtcatttaccgcactccatcccttgaatatgtaaccataccgtgttgtagtgggaagcagtgaagtgaccggattgcctgctgttcccaccagtgtctccggttccggtgttcctccgttgctgttgaatataatctgtgatccgattttgcggtattcatagttgactgccacatcctggttcggcatggttccggtaacccggccaaagtccgccccgggtgtcaggttagccgtaagtgtgggaggcgtcccctgctctatgaccacaccggccagctcgtatcctgtaatggccggtcccggcgcaagatccaccgattctccggaagcttttgagacggtgggaataggggtgactccggggattgaaccgcccgtatcagcgtccctcacagtaaagctgatctgaaggccgtttcgtttgattacggcgtttctgtcatttcccgtgccggcgcctgtcagattcttagtgcccaccgtcacatatacccctgtaccgtccgtttttgcctgatccgcaaagaaattgtccgcaaagggacttggagctgtatccacaccgcttcccgacaaaggaacggcaatttttatctcctggccggccagcgtggatattccccccggcgacgcgtcaggctgcctggccgttgtaacaccaatccttgaggtgttcaggtcacctgttaccgtgatggtcctcccctctgccagatacacattggccttagcgcctgagggggttgtattactctctatcatcacatcattcagtacgttgaatcttcctgtgctgtcaaagtaaacagcacccttgccttccgagacatttccggatatcgttccgtagttcatggaaagagccgcactgcctgttatattgacggcacttcccttgcttgtgttgtctccgtggcaattacgaaggtccgccccactgtttatttccactctgccggatccggcagataccagcggttcactgctcacactgccatttccatccaggacaagatccgtcagcttcagagttgctcccgataccttaaaaataggctcgttaaaagaaccggctcgttttagtgtcttaatataatccgaattctcattggtgggattgccgtttctgtcataatccgtgcttgctatggtaatatccctgcctgaacctgacacctcgataggggatgtgatgtccgggtaatccatgatatagatatatcccttcttattccctatcttctccaaagcatattctatggttttaaaagggctgctgtacgtgccatcagcggccgttgaatccactccggattccgatacatagtacgatgtatccctgattgcaaaggcgacacgcttatgtacgatttcatacggatgaagctggaaatgccaggaatacgccataccggagtcttgtccgcttaaggaatcccctccgtcttcattgaacacattgcttccccaattgctgtagcgtccaatccatctagtggtcggaggcgtaacgccaaggctgctgtcattggtaatacagtcaaaggtagttttcacatgctggttcaccatgtggaaaccgcggttgttcttatagaccgtggcatagtcgtcttcctggctgccgcctatcatgacgtccgtacctgttcccagtttcacggacctgccttcggttcctccccgtccggtcttgtcatacacataataatccacaaatatatatttgttatccgggcttggtgacagggcgattttaaattcaatgcccatactgcttatatcttccaccgcgccgttggtacttccattggccttatacttggtaccgttttccacctgaatgtaggtggcatacccctgccagctatatgtagtcttaattccgctttggctgtatcccgtctgtccggcctgtaatccgcacaaatcgaaacggtatgtgctgttggtgggattttccccggttccgtttctcggtgtaatccatgcgtaggccgttccctcgctggctccatttccaaggttttcatcgggcagctctgtggaggcatatgcgaccacagccatctgtgacgaccataatcccgcagtcagacacaccgttaaaatcagggaaacaatacgtttccatatatgatataattctttactcattgctcacattgtctcctcacattaaaagttcagacattcttcctccggcagtccgtccagtaaaggttccgtattgctgccggcgatcagacctccagcatatttattttccctgttgtcagaatcataatggtagaatccggtcccctcttctcccttataccatctcggcttaaactcatcgtccaccctggccgcgaaccggccgttaatgataaccagccatccgccgtctttatccttcacaaccttcttattgccggtgacggtctttccgttggtatcgaccacccggtaggtgtcttcactgtcccggaccacgccgtacccatattcctcatccgcctccagccggagtccgtttatataataggaatcttttacccgtttgagacggtttctgttcccataggcgacaccatcacttttaaaaccaaaggtatgcactccatcatccagttccaccttcaattcactgccggtctgcatggaaccgtcattcagttcgtccggcgaaaagaagtagaggtccgccttctctataccatatatattcccttctatgaaatcctccgacgaccatgcatccatatcatactgggctacgaatgtgctgcgggtatcaaagagcacaaaccccgtctgcatcctgccaagtccgtcaaatgcataataccggccattcacattttttatcttattctgaaaaatctttccattttggtccgtgcgccaccaactgtactccccatcatcatagtcatcctgtatcagattgtccgatggatacatccaaagccatgagtccctcagaaggcttccgccgtcataccccgcaaagaatttggcgggcacatcgctggtgggattgcttttatccgcattgctgacacttgccaccttggtccaccagggaagcatgattccatactcatcaaagccgtatgtgctgccgtttatatttttttgtatcagccggtctccattgcttttcacctttttggaacggttgttaaaatacagccacacctggtcatattcatcgtaatccctgccgctgatatcactgttcaaatcctccagtccacttaactccagctgcgaataatccaaccagctctcagtctttaaggcaccgtctttatccgcatagtacacgccttcctccaacgggttttcatcctcatccaacggcctcccatcttcatcaaaccatccggtcagcatgcggccgctttcatcaaatatgtagctcctgccatccacactccgtttaaaagaagatgtggtatctcggtatgccttaccgttagcgccaaaataataccatccggcctcatggcccttctcatccccctcctccaccagaacccacatattttcagcccgcgctccatcatcaaacacataataaaggctgttcccctggtcaataaaacaattcctcagcataagcccctggtcgcccagatagaaccaggaatctcttgactgtctccacgtattttgcagcggctcatcgttttcatctaaatagctccactccccatcttcgctcatccatccctcaaccgcataggcggtcactggatgaagcttagtcagtgcaaaagctgtaacgaccagagtgctggcaatgagcgttattctctttttcatcatcctactgtccttccaatccttatttgaaatatatatttattttaaaccctttgttatgggttgctttacccctctaaatacacatacttttcttttcttccgtatcgtaccgcctcttcatgggaatcaaaaaagatgtccagccgcattccctctaccgcttttccagtatcctccactgtgtaaaccacatcatcaattacaatcctcgtaccaagcggtatcacagacgggtctgcggcaacggtatgggatgccctgggcacggtttccgatttcgtcagcctttcctccttttccccgcagcatattgtacagctgcagtatcctgtaacctgaaactctcccagataatagggactctcctcaggcaactcggaatgtctgtatatggcgcatttcttccggccgaaccgctttgcttcctcatagctgtcaaaatatatccgcagtttttctttggcgtcttcatccaccttatcctcaatcacataggtatctccgtcaatcagtaccgtgtcccctattttaaagacagacagtatgcctgccgctgtatggtgttccaccggaactcccccggaatacgtcatgtcactttcatccgaactgtaggccgccacctcccagtcccccaggtattcaaactccgtctggtgttccgtctggcgttcactctgggttgattcccggttcgatataatctccagccgttctaccgcatatggattatcaacggtcccggttccttccaggtccggctgcatctgttcagcacccgctgtggacagctgggaaaataaaatccaggccaccaatccaatcaggccgcatccaaagataaccggcctgagaaatttcctcatcatattatgccttcggcaggatctgcggaattccgtcatcctgtatccatgaatgttatctgtcatcctcctgtcccccgagtatcacaaattattatgcatggagtccatatccatatctttttgtgttataaatttccatctggtgcctcccaaacttttgtcccaagtaatgtcacagtatctccactccccatcaagccaggttctgttccatgcatgatctccggcatatacaggctcacaaatcagtcccgcattcctgcacagcataagataagcagacacgtatccccagcacacagcattaccgttcataaccgcatcatagatggtccggttcttcagtgtctggtcataggaaacattatcatagacccaatcataaaaatactcagccttctcccgatctcccaatgtgctgcatttctgcaccacctcagaaagcctgtcctgaacctgactgtgttctgataccgcccgagccggattcccgcatgacacataaatgacgaacttcccattttcatcaaatgagtataatgtcacctcttcttttcccaaatatatgtacctgtaataatatctgccaaaggaaaaggcttcctcctgagagtcaaaaacaatatcagtttttataaaactgccgttttctcttcctccttcgagtgcatccagcacatcttccccaaggcattcaaattctggatactggctgcacatttggctggaaagctgcccagcaacgtcaacctggccagcggaggattctgtttgctgcattgcaaacaaattttttgcaaaacagatgttcatgataaatacaaaaacaaataaaaagcaaatagaactaaattgcttgatttctcatccctcccgtcctgtttttacaactaaatatttcttttgttgtaactaaaaaagggggaggggatggtaaaacgggatatttactgactataggaaattttaagagaattaattctgaagtttgagagaaagataaataacaaaaaatgtgaaaataataccaagttggtttaatttgttacccagcttactttttatatccttttttatcgaaatttttttaaaattatgtagaattttgtcaacaaatgtagtatactttttttaaatctttcaggaatatcctaaagtacaacaaaagaaatattctgttgtatcatacagcagcaatttcattttttccaactgtattctgtgctggcttccgctttcctttgtataaattctggtggtattaatatccctgtgtcccaggatatccgctaattttgacagatttttttctatttcatagtatgtccttgcaaaaaggtgtctcagattgtggggaaatatcttttcagccttaacattggcctctatgccaagcgctttcatttccctccatatattactccgatccaacggcttaccgtttttcgttacaaaaatcatacctgaactaatattatttttttgcgcataagaatgaaggagcgaacatagctgtcttgttaacagcacagtccttatcctgcccttgcactcaatttcagcctggcctttatgaatagctgccaccgtgataaacgacaattctgatacgcggatcccgctcgcgcagatagtctccagcacaagggccagccgttcattcccattgtcaaaagcagtttttaccagcctcttatattcgtcctttgtcaattcctttctctcaggataaaaagaacttttgctgatttttaaaaatttactttcacagccatcccatccacaatatttaaagaaaccattgagtgcagctatgacacagttaatggtaaccggggtgatatgttccctcaggtttgctttccataaaagtaccatctcctttgtaaccggctcttctccgataaattctttaaattgttttaaataatgcctgtatttctttactgtttccatgcttctttcacaactttccagccattgaccaaacgcttctatcttctggtaagttatgagcctttcaccttttcttttcattctagcctcctgaaattacgtgaaatgatatagtttgctcagacggcaaaaaacatcctatatcccctttgagatattggactttttgcttattattagactttttcaaaaaatatcataaagcttgttttgaattatagtctaatttgtaattatatacgatttataaatcttttaatattatatttttattaattttcacagcgctggtccggcaatctcctgttagtttcattttccgcctgatagccactgtacattgcggtttttattctcattttcgcatcattccacaaacaacatcacccagaattttaagccggcggagccggtaagacatttccatgaattctgctttatgattcatttcatccactgcccctgcgagatttacatataataccgtataaaagacaaaagcaaaatttcttttctcgaattgcctggcaatacttcacgtatacatatttactgtttagaaatatagtgtcattccattaaaaatcctgtaaaggctgacagtctttacaggatttccatattccatgttttattttctaaaagctacttccaaaattaaattttgcactgcttatccatttatttttcattgtcatcccctctttttctgccaaggaagccatacaggccaagcataagtcctgacatcagacatacccactgtgccattggattctgccctgtcttgggaagaggcgccaacggaacttctcccggttcaatggtaactccttcgggaagaggcgctaagggaactgcttccggttcaatggtaacaccaggtccgttggtatccggtgtcgcgcgatgcccgcccggggtggtacctcctccgcctccaccactggtgcctccgccggatgggggagatggcggggtgggaggggtggggggagtcggaggggtcggaggggtggtgttttctggtactaaagtaattgcagcatagtatccacaattgtaaccctgatatgcatttcccattctgggatggaaaaacattcccagagtaaagtcacagctttccccgctggataatccatcgccgagtgtatctgcgaaacttgcatccgcgctctgccattcgctggtatcatgatccataaacagtgcaaggggtgtatcatatccggttctctcaccaaatgtcacaccaaataattccttataaaaagtgtcatataaaaggcctccaagctccggttccacctcataaagccgcgcttcaagtttactttttgatgtgaaaatattagcgaagtcaaagtagggataagtaccgtcatacttagctgctacttcatcaattgtaccgcttaaatcaaatgtgccgttattacccacactttccattgataaattgccaaatacagtacttaaatcatctgtgtgatagtaattcttataataatccgttaaaggataatcgccatcataacctttttcatataagacatcgtaaatagtcagcatgtcttcaaaacttatttttgttttgccaaacagctcttttattgcattgttttgaacccggtatgctccataagtacggtcaattatctgtccgtcaaatcctttgatcgtcacatccattcctgaaaaggatgtgtcaacatttgattccggcgtttgaaccgataggctgttggcctcatataaatactttatttttgaattattagtcaggtttaaatttaaattaaatttatacgttggcatgactccatcgtccgccccaaatttgcgcattgcttccataaaagcgtcactcaacacaaatgtaagtggtccctctgcatcttctgcgattgcagcatctacggtaagatcatacccaccctgcactttattcaaagtactatttgttgtatcaattactatatattctgaattatttctatactcaaatgtgcttgtagatgataaatatgatgttggcacatatctatgtccgaattcgttgccatccggatatgctattgcaaataccgaaaaatggctggtttcaaatgcaaccgtcccctctccttcatttacatcacattttatatcattaacttttagatcattttcctgatcctcaaggtgaaacacgttaattttatctgattctacagatcgctcatttgaaactgattctggaatatccaggccggaaaatgaaacctttacattacatcccggttgaaccggctgtccattttcatcctccagagttatgtcaaatacccttacttcaaccgacccgtaaccatccgctgcacattttcctttaataacagaactggtatcttcatcatcaatagcaattgcagataacgattttaccgaagcgtcaaattcaccatccaatggctccactgaaattgtaattccgtcaatctctgccataaatgctgctgtatcagaaaccgtctcctctgtttcgagaagttcaacctcaatatccagattctcctcaatatccgttactacatacgttgccataccggccagcccgctgtcttcctccgtatcctcttctgcttcagcagccagctcgtatccattggctgttacaatctgaatcacataaccatccacaggtttaaccgtgaaagatagctcctcaccttcctgtattaaggtttcaccctcaacctcagctgccccctccggatttaccgtataggtgattgtaaattccttctctttttcctctttgtctgccaggtctccagctgccgccccgccagctgctacgccacctgtttctccattgacgttttcttctccttcgactccaggatcttctgcgccttcccctttgtttccggttccttctccgctctcgcctccggcggtctctccgccttccccttcacttccggttccttctccgctctcgcctccggcgttttctccgccttccccttcgcttccggttccttctccgctctcgcctccggcggtctctccgccttccccttcacttccggttccttctccgctctcgcctccggcgttttctccgccttccccttcacttccggttccttctccgctctcgcctccggcgttttctccgccctctccttcgcttccggttccttctccgttctcgcctccggcggtctctccgccttccccttcgcttccggttccttctccgctctcgttaccacttgagctatcgcttccacctgtgctgtcgcttccgccggaactgtcgcttccgccggaactgccgcttccatcggaactgccgcttccatcggaactgtcgcttccactggaactgtagcttccgctggaactgtggcttccaccggaactactgcttccacctgtgctatcgcttccaccggagctatcgcttcctcccaagctgtcactcccgcttcctcccgtgctattgcttccgccttcactggtaatctcctgagccagagacacgttcaaacatgtgccgacattagaaaaagcaagcacgatggctgtcagcagcgccgcatggcgtgaatgctttttcataacatttttctttatcataaccagtacctcctgatatttacaaatacaaccctttactcaactcatggtaatataatataggagagggtatttcaaaaagcatttcaaagaaacaccttttcgtgtctattttcagctttttccaatatgtgactgaaatgtaaccaaaagggaacctttttcaagattcccttgctatttctatatgcacagaatgaccgcccaagcgaaaatctgcctgtccattttacacagacacgcacggtgcttataccaatgtattccacgctgtttccaaagccaccgacatcatatccccaaaggactcctgctgcttctgcgcggtcatggccttctccttacagttttttcacgcctgttttcttcttttcctttttctgtccccggacaccaatccttcagattcacgttttctatatgcagacttaccttttgcccataccttctgcgcatcccggatacaatacggttttcaacaatgcggcatttatcttcccgcagttcgtttgccagaatcagaatctgatccggtccgtactttgtataaacgtctcctctgcgaagggtactgtggaccacttcacacagagcgtcctcatactcctgaagcttcccgccatcctctaccgggcaatctttcccgtcccggaccgtgcatacaatcagaaatcccctgcgttttccccgctccacggaccggataaccatacggaagcagtcaacaaatcccggataagtacaataatacgatccggccgaccactccctttcctcaagattccccctgatctctttcagaccgccattcacatgctctatctggctgccaatctgtttgaaatacgccagcacgtgatccgggggaatgctgccggtctcgtcaagcagcgtttgtgttacataatcatatgtctttaacgcatctccataccgctttaacgccaacaaagctccgatcttttgctccgcccactctgccaggggataggccgcagttgcagcatcgcacagcctcacaatcttctgatggtcccgatggttcttcatcaggcggcaggcttccctcacgcctttgaaataaatatcctggtaatggctccgaagagattccgcccacacctcgccggacagaacaggaaggaattctccgccgtaaagacggcaggcctgttccagaagcagctgacgtgcagcttcatcttctgtttccatagcccggttataataatcttccatgagagcggcgtccatctggagttcaagttctccccccactctccccattttcaaataatatgtatttttttcgaccaccacatattctcccgaaggcagaacagactgggaaagtatttttctcagacgtgttgttgtaatcctaagcgcgtttgcagcatccgtacttcttctgtcataaagaaaatcctgaagctttacgcggctgattccattttctccagcccatatcaggagcaggaaaagctgcatcacctttcccttaaccgacatcggcagctcccacggctctccattataaagtatctccagtgttcccagcgtccgggcatataatgtattcctgaccgccaggttatttttgtttatctcattcatctatggtaccgccttttagcgtctatttttccaattataaccattatacaggaaaaccatttcaaaaagcatttcaaacttacattattctgaatttatttatgtctaaagcccatttcccggagtaggaatggtcaatttttaatttaatcctatacgcttccagacccataaacttcaggaataccaattggtagagccggacctttaagtgaaagaagagttcgcagtacgcaaaaaacggaaaagaatctgcaataagataatttcccgtttttatgttatctattttgatatccaccgaaactattcagtcagcatctacccacaaatgatatgttccacagtgcagacaccgaaatagatatccggccaagctgccgctcttttccaaatactcccgtgcattgtcaaactcatcacgggcatcgtattcggcaaaaacctcatccgcgatgcccatccgctctaactcttctgttccaacatcaccgataaatgcacaataatcattacaacaagccagccagtattcaccctgccagcttgcatatcccggagtccgcttaaacaattcctctgttttttgagggtcggaaaccaagccgctttccgcatcctgaataaaatcacccttgaatttttctgccgctttcccgtctgatatacactccaggcagatacaatgaacatcatctatacaatacatagtactacagtattcattcacttcttttccacaacactgacagatgccgttttcatgttcaataatatcgttatcatatacgttggggtgatacttaaacataatcttcttttccatatcattacttcctcgtaacatataaataaacgctgctataacttccgattcaggtaaattataccacatagcagtccaaaagaacataacggaatccattgccggataacggattaaacatgcacgaaaaagcaggccttcccatgcgccgcccaatgctgtgcatgctgaaataaatatgcggcccgccgggaataagcggaccgcacagcatatctatatataactctgttcagacacatccgcatccatgggattgttgtggacgtggccgaatatattgcattctggtttttctaacactgcttacggcaggttcaggctttttccaatgggcggtccaggatatcacacagatcgtcataatccatctcgccgttaaacctcagtacttcctttccattccggaatatgactacgaccgggatacctcccacattgtaggtgtctaccagctcctggtttgcatccacatccacataacggatttcgtatgccccgtcatattcttccttcagggcctcttccagcacagggtgcagggccttacagtgaacgcagcgctctgcgccgaacagtaccaggaccggtttatcctccactgccaggacctcatcattccagctggctgtgccggcgggatggaatacctgcgtatccacctcaaagaccttttccctctgtgacaggtcttcctcatcatccgttgccacacagagcgctacatcctgataatacggcaaagtcccctcaacgtcaatcaccgtttttgccccaaacgcgcccgcgcccggaacacggtaagtcacattgtcaatgcgctcaatcggtacctctgccggaaccggctcctgcggcacataactgtaggggtaacggtaggccctgtaaatcatattgttcctgggccccttttcattgtgcgtgtaatacggcgaaatccactcccaaacaatctcatggtccggcgttacctcaatgagtctgccgtctgagccttcggttaccagggtattgccgttgggcaggcgctgtgcgctgctgacataggggctgtagaatttgctggcgtccgtgggaatcgcatggcccagctccttgggagtcagtttccataccacttccaatgtaacaggattgaactccagcacacggctgtaatccctcaatgcatttttgatgccgattggagaagatgggttgggggtcccgtagccgccccagccgccgttatcaaagaccatcaggttgccttcgcccggcagccccttgggaatcatgtggaaatgatgctgtccgataatccatcccagcttcttaagctccggcgctgcgttaaaatcaggtccgatccgccatacaatctttccggtttccttatccaggattgccaggatattggcttcccggcagtcaaagattatgttgtccggcttaaaacgcatatctccctggtcataccatttattgggtcccagatagctcatgcagttcacatgcaggtaatcgcccacacctccgtccgatgcgcgcaggttggggtcgcggaacagcacgttcttggcggcctcgtcaaatcccagttcgtcaaaatgctcgctgatggaccatttccataggatatttccatcccagtccacttcaatcatggcgtcatccagcagttttttatcggaaatcttgggattgtggatggtctggtggaccaggatcagggtgttgcctgaaagtggctttgcatccattccgggtacgtaataaccaaccggattgccctccctctggtaatcatgatgctggcgcgccatccatctgtggtccctgccaggatcgtcgatattttcaaaatggtcaaattcccatacaatattgccgtcatagtcaatctcaatcaggttgaccccgtcctgcatgccatagtcaggatggcggtatccggaaagacccatcacatatccgccgggaagaagctttggcggcatggcgtgcatattccagcgccttacctcgttgccgttcatgtcaaacaataacacgccatcattgattaacggaacaatcgtataaccgctccagcatttttcagggttgtaaacagtgactccgtgtggaaaaacaagtggctgtcccataattcatatcctccatttaattattattatttgttaaaaagcctgtttgatttcaaccagctttccgttatcgtaaaatgcccccgcaaccgtccgttccagcttcaggctgttgtagagcaggctctgccttgtgacgtcctgcctgtataccctccactgtccgcttaactcctgttccagccgggcggtcttctcaatctcctcattgctgtacgggttgtagaataaaaatacggtcctgcccgaatccggccccaggattccctgtatctgttccagttcctttacatagcgctccgatgcaactgccgccaccgcgccgtctgccgccgaggtaactacctgacgcaggaatgtctgggtacaatcgcccgccgcataaagtcccggaacattggtctccattttctcattgaccttaatgtaaccggccttgtcgcagtccaccatgtccttcaccagtccggtctggggcaccatgcccacaaacaggaacaaaccgtccgccttcacctctgtttcccggcccgtgtcaacattctttaataccagtgactccacatggtcgcttcccttgatttcctgtaccgtggaactccacacaaaatcaatcttcgggttcttataggcatgctcggccgcaacctcgttacagtccagatgtccttcctcatgaagcactacaatagtcaccttggatacaaatccggtcagataatccgattcctcaatggcctggtcgccggctcccagcacatagatttcctttcccttgaagaattccgcatcgcaggtcgcacagtaagcaaccccatgcccggtaaattccttctcgcccttgatattgagttccctgggcctggtgcccagatccaggatgacgctgcgtgccatgaaatccccccgccgctttgtctccacaatgaatgtatcgtcctctttccggacccctgtcacggtagtgcgcttaagttctaccgcgggatggccggccgcgtgttccctgaacagttccatcaggtgctgcccgctgtccgctttcgttcccggataattcctgatttcatacgtatcattaatccttccgccatagctgcccttttccagcagcagtgtcctgcgctcggaacgtccggcataaatggctgctgacagtcctgccggtccgccgccaacaataataagatcatatactgagtccataaacaactctcctttctatcataaaacacgattttggttcatatcattttctgcttcagctcccccttaccgtggaaatctcctgtgccttttgatgtccgccctttccagccctttctcccaaaaccacccagattacacagattcccgtaaggaacaggcagtaaaatgccgcactgaaaatctggaatggggataccgttggaagatagctatgcttttgcaccatctcattgataattgtcacgctgcccatgacaaatgctctgttgataggaataatagcgctgaagttggtggcattcgctgtcaggagaatgctcctgcgttccggggatataccgctttcctgcccaatccggtccgccatgccgccgaacatcaggatagacggcagcacacagcctgccagaagtatattggtaatgacgattcctgctgtcagtacggtctcagagccgcgtgtggttcccatgatattcctgcgtaaaagccagttacagcaccgttccatcatccccccatccacagccactgcaatcagcccatacagcaggatggtggaaaccaccacatccagcattccgctgattccctcaaagataactcccttgagccccaaagtgccatagtcaatggccacgatgtcggaaggggcaagaacccctgtcagaagtcccactgcgaatcctgacacaattgcaaaggacaatcccataaacagatttccggtcctgaaacagacaagcagcagcactgccagcggaaccagcatccaaagtccctggggggaggacatggctgatatctgggaaatatcccccatggcacctccgcgtccgccaaaaatcagataaaccaccatggctgccccgccagccgccaggatatagggggttctcaccctcagggtcttcaacaggtctgcgggctgtcccgtcacgccgtcatgctgtatcatcacagttgtattgatgacctgtgagcttggggagattgcatccccaaagaaaataccgctgattaaagcccctgccagcatggccggattggctcccagcaggattcccggcggatagaaaatcggtatcactgcaaacatggctgcaatcggtgcacctgcccccatggaaatcatggctgacgccaggaaactgaataccacgaatccgcttcttgaaataccaagtttgaggctgagccagataaacccgtccccaatccctcctgtattcatcaacttggaaaaaatgccgatgaccataaaaacaaatatcagcctggaattgccatactgggccagaccatggaccacgctgtcccaatatctgtccttctccctgcaaaggaaaaagcctgcaaagagggagaccgccgctgcaaaggacaggcccttcatggaataatagtgaagtccaactgaaaatgtcccgccgatcagtatatatcccactaacggcagcatggcaaacgcctggttaccataaaatgtaagtttcgtttccgcagtcttcatattcgttccaccaatccctcccttaagatagttaaaattataacaggttttttccgagggatgtgttggagctccaacacttatgaaaattttataatttattatcgtttttttaacatggcagagtcattagtacgtatatcattgggaagcggttcgtcaatctcatgtcaatactgctattatgtgttctttcattcgtttttaattgtgcataattaaccactattttttattaaaaaagagcccccacatccggccggatgcttggaagccctttccatatcaggtttgctcatctttttatcagttgtttgtctatttttcaacgttccagacaaaaggaaacaataggaagtggagccgccggactgcaaacggcacgcgaaatgcacacacagaacagtgatatttgctactccttcgttggccaaatggattggcccagatggattgacccaaatggacttggcccgaatgacttggcccaatgaccgccctatgtgaccttagaatacctccgtttcaaataccgatttgtccaactccccacgcaagccggacatttattttgaaggtcttgatttctcctgaaccaactcactttcaaaagtaacttttacaacagcatgatttattttcgttccagtaaaccgcacatcgtactctttctctttttgtagattattgagcggaactgtgatggtatcaccactcactttttcatcccatgtattgctccataaaacttcgtctgcatttctatcttttatttccacaatacccctttcaccatccatctgaaaatagacctctgcgtccaaagtttctatatcctcagacacacaaaataagcgtccattctcaaacggatctgaattactgtaatttgcattcatttccatttcaagaacggttttttgtgtttcctcagtatctgatacatttgattgattaacgctggctttttgacacgcggacaagctgacaacactaataatgccaactaaaaaaaatagcaatttttttgtgctaaacatttctttacctcccttacaaacatggatttagataaattataacacatagcaatccaaaagaacataacggcaccttctgtacatatgtatatgtataatcctgtcccatgctccatccccattcaagcaatcttaaacagacttgggcaaaacaacttccagaaaatagaaaatcccctggtccgctgcccaaaccaggggatgtcatctacatcacaactccaacttcatcaatcgccttaccaatatcatgcctcatatacttattcccaaattccacccactccgttgccttataagcattttccctggcttccttcagagtatttccttttgctgtaacccccagcacccttccgccgttggtcactatattcccgtccttatcgaacctgcttccggcgtggaatacataatacccgtcctgtccgtcaaaccggtccaggccgtctatcttatatcctttatcataatgctccgggtatccgtctgatgccagaaccacacatacggctgcattgtcctcaaattccagctctatctggtccagggttccgtccacgcaggcctcgaacacatccacaatatcattcttcatcctgggcagcactacctgggtctccggatctccaaacctggcattgtactccagcaccttggggccgttttccgtcagcatcagaccaaagaaaatgattcctttaaattccctgccctctgccttcatggcgtctacggttggctggtacacatactttctgcagaatgcatccacctcatccgtatagaatgggctgggtgaaaatgttcccattccccctgtgttcagtccctggtccccatccttagccctcttgtggtcctgggctgaagtcatgattttaatcgtctttccatccacaaaggagagtacggatacctcccgtcctgtcatgaactcctcaatcacaatcctgtcaccagcagagccaaactgtttatccagcatcagggtcttgacgccttcctttgcctcctccctggtgctgcagataagaacgcccttccccagcgccagaccgtctgctttcagcacgataggcatgggagccgtctccaggtatgcaagggctgcttccggagaatcaaaggtctcataagcggcagaagggatgttgtacttcttcatcaaatccttggaaaatgccttggaagcttccagtatggcagcatttttcctggggccgaacacacggatgcccgcattttcaaatgcgtccacagcaccggctgccagcgggtcatccggtcctacgaccactaaatcaatggcctgctctccggcaaatgcgaccagcttctcaaagtccatgacaccgatatcaacgcattcagccaccttggcaatgcccgcattgccgggagcgcagtataacttctccaccttcgggctctgtgatatcttccatgcaattgcatgttcacgaccgccgccgcctactatcaatactttcatgacgttcctccttattctgaaaacatggcacacatggcgtgcgctactgtcaaagagatgttactgcccattggcaatcatgttgattgctttaggaaggattacccactctgcctgctccataacccttctttgcaggatttccggggtatccccttcctccacttccactgccttttggaggataatggggccggtatccatgcccccgtccacatagtggaccgtagcccctgtcaccttcacgcctctggccagggctgcctcatgaaccttaagtccatagtaacccacaccgcagaaagagggaatcagggatggatggatattgatgatacgccctttatacttctcagtcatggccgccggaatcatcaccaggaatccggccagtacaatcaaatccaaatcatattcatctattttggcaagaaatgcctggttgaacgcgtccctggtgggaaactgttttggagaaatgcagacagcccggatcccatgctttctggctctctccagagcataggctcccggattattgctgatgaccacagatacctctgcattggtaatatcaccatgatccacggcgtccaaaattgcctgaagattggttccgcctccggataccagtacgcccactcttagcataaggatacacccttctctcctttttcaatggagcccactacataaggagcttcgcccgccgccttcatggcttccatggttttctccacatcagcaggattaacggccactatcatacccaatcccatattataggtattatacatcatctgctcttcaatccgccctttttcagccagcagcttgaatactggaggaacgggatagctgtcctttctgatgacagccttcacgccgtcttttaacatacgcggaatattctcatagaagccgccgccggtgatgtggctgcacgcctttacggtaacgcctgcttcctttacgtttctcagggccttcacataaatcctggtgggggcaatcaacgcctcgcccagggtagtccccagctcatcataatatgtattcaggccttcctttgtcagctccttctcaaataccttgcgcaccagtgaaaaaccattgctgtgtacaccggaagaggccattccaatcagaacatctcctgcacacaggttttcgcctgtaatcaggtccttcttatcaacaataccaactgagaatcctgccaggtcgtactcatcctccggataaaagcccggcatctctgctgtttctccgccaatcagggcagagccggactgcctgcatccctcagccacgccttttacaattgtagcaattttctccggaacattctttccgcaggcaatataatccaggaagaacagaggctcaccgccagcgcaggccacgtcgttgacacacatagccacacagtcgattcccaccgtgtcatgcttatccatcaggaatgccagtttcagcttggttcccacgccgtccgtaccggacagcagagtaggctcctccatccctttgaacgcggacatggaaaatgctcctgaaaatccgcccaggccgcctaatacctcagggcgcatggttccctttacatattccttcatcagttccactgatttatagcctgcctcaatatcaactccggccttcttgtaatccatcatggtttctatcctctcttatctgctatttcatttgatttccctttaaaatttccttttatttcccttttatatttagctggatatttcctttgcccgtttcctttaatctgtcttatttcatctgtgcaagatattccttatagcccacctgctccagcttctcagcctttttcaccacatcgttcttcaggctttcggaatacgctttcagctttgcaagcagctccgcatcggaggtggccagtatctttgccgccaggattccggcgttggcaccgccgttaatagccacggttgccaccgggataccgcttggcatctgcacgatggaatacagtgaatccacaccgcccaggtcagatgtcttcataggaattccaatgaccggcatagggaaaatggccgcgcacataccgggaagatgtgcagccttgcctgcacctgctatgataaccttaaagcccttatcctcagctgcctttgcccagtcaaagaatacatcaggctccctgtgtgcggaaataattgtcatctcgtaatcaatgcccagcttgtccagaatctcagctgcctttgccataataggcatatcagagtcgcttcccattacaattcctacttttgccattgttcattctccttttctaaagctcattatccttgtagataattattattagtttttcttataagtatctttatatagctcaattctacttataatcataatactaggaaatgcgtatgccgtcaatataaaacttgaaaaaagtcttctgcattttaaattgtttttataatgtatctgcctaaaactgcctggttcctgcatctatcagccaggctatcatttccgacacaggctggtgaacaaaatacgcaggggaatgccggtatggagcccatatgggtccgccgtacattcccctgcaaaatccttcaagtttctttccggtatcctattgcctgctgataaattccaaacattatctcaattccagaaatataaaatttatcattatgttttccttggcatcagtaatcatacttctctgcggctttcttcagtattatcacacattgcacctcagcattacattctatcatccgtaacttccattgcacgctgccgtcttagccgggcattaaaaatctcaatcatccatcagtcatcgtagtcattgccatcgtggtcatcatcgtgccggtcatcgtcatcatcatcgtggtcgtcatcatcaaaccggtcatcatcgtcaaaacggtcatcatcatcaaaacggtcatcatcatcaaatcggtcatcatcatcaaatcggtcatcatcgtcaaatcggtcatcatcgtcaaaccggtcatcatcccaggctcccgtatcattgtcccagtccacatccgcaatcctgcctgtagcggcatttacatccacctcgagtttccttccatttaccagaaacctcaattcataaacaccgtcgtccaggtcacatcccttgtaggtcagttcattttccttcagccccaattcctttatggcgatccgcttcgcctcattcttccctatatataactgttctgactgtttcccgttatccttaagtgttatggtgatatcaatgccgtttttgtttactgcttcccatgcagcctcttctatctctttcatgaagtcggccctgggataaacagatcctttttcagactcaatgagcagctctttctcatttttgtctccgcggaaccatcccttatcatccatacgctttaccagtctgcgtacagctgtatcacagtccgcaccggcaaaattccctgccccctctaataattttcgtccgtcctgattcagtccttttgcctccaggacctctccttccctgtcataggaaagggatatcttcggacctgcgctgaggaacacacgtccccatgtttcttcctgaatccttgtttccctgttggagggcgcacccagtgccgtgctgcccacaccaggcagagaaagggccatgaaacctgcacacaccaatatagctgcctttttaatcctctttgccgtcataattattttcctcctgtctgctgtgatttatttatctacatccgtagaatacgtgagacaaaatgtaaaaccggggtcgcggacaaaaaattttattttatttcccttctcattgctgctgccaaaatattgacaaatgcagttggctgtgatatagttgccgcattgtaatgaaggagaggcaggtatgggcttttatatattaaatcaacctcggaagaaagagatctctgtacaattcataccgatgaaacattgtacagagtatggcgtatcttatgcgctttcgtgatttcatcgggaaactgagtaatggactggaggcagcagtgtagactgccgccggtttgattgctcttttttcccgtggttatccgtgcataaaaggctatggacaatgttttgtccatggccttttgtaatgtgaggaaatcgtatggttttgtaatacggcagaaggcaggtgcaaatttggcatctaccttctgcctttttttgtccggttacaaacaatacggtttcctcccatacagctttcacctcccatacagctttcaccgctcatccatacattgcaatacagcgcagcaccattaaatataaaaggagtgtttcaattatgagtttattagacataacaggactttcccattcttatggggacagccgcctttacagtgattccgatctttcccttaaccgtggggaacatatggggattgtgggtcagaacggaaccggcaaaagtacgcttatcaaaatatgcacggaacaggtcatccctgattcaggccgcgtgtcctggcagccgggcattaccattggttatctggaccagtatgcctgtaccaatcacgttttgaccatggagcagtttttaaaatcatcctttcgcagcctatatgagcttgaagccaaaataaatcgtctttatgacgaggccgcattatcctgcaatatggaggttctgaaccaggcatcactttttcaggagcagttggagcgcagcggtttctactccattgatacccatattgcccaggtggtttccggtctgggactggtctcaatcggtttgtcccgtcctcttaaggacatgagtcaaggccagagagccaaggtcatcctggccaagcttctcttggtaaaaccggacgtccttctcctggatgaaccaactaatttccttgacaaggaacatgtggaatggctgggcggttatctttcggcgattgaaaatgcctttatagttgtctcacatgaccgcatatttctggagcggatatgcacacgtatctgcgatatagacaacggcaggctgtccaagtattacggcagctatacggagtttctgaaaaagaaggcatttctgcgcgaggaccatataaggcagtacaatgcgcagcaaaaagaaatcaaaaaaacagaggagttcatacggaagaacatagccggtaggaaagcacagatggcccgcggacggcagaagcagctggaccgcatggataagctggcggccctggaacaaaaggaaatcaaaccggaattctgtttccaatgccttcccttgaccaaatgcctgcatttgtccgtaaagcgtttatctgtggggtatgattatcccattttgtcccatctggatttttccgtaaccggaggacagaaggtggtggtcactggttttaacggcatcgggaaatccaccctgctgaaaacattgacgggaagcctgaatcccctggatggggtcttcgctttttcacagcaggttacaatcggatatttcggacaggatttcagctgggaaaatgatacattgactcctgtccaaattgtctccaatgcctacccgaagctcacgcttaagaagatacgccagcatcttacccgatgcggggttctaagccggcaggccgtacagcccataggcacattaagcggcggcgaacaggcaaaggtcaaattatgccttctgacgcttagtccctgcaactttttgattttggatgaacccactaaccacctggatatccaggccaaggattcactacaggcagctcttaagagctttcccggaacaatactgttggtttcccatgaggaatccttttaccgcagctgggcaaaccgcataatacacattggggattactcttctccataaatacgctgcggcttttgctgtgccgcaggtaataacataaagacggaaccagatggagtatatcccagcccatctggttccgtcctgcttttggtcataccgtagtcatttggcggtatttcctcccggcggcatctcttctattttcttacgttacataacacgctgcatgaccagcacatgatatcagtcatcgtcgtcctcatcttcgtccttatcatcttctccatcctcatgcccgtcgttatcctcttcttgggaatcgttttcgtcgatatcgtcttcatcagagtctccttcatcggaatcgtcctggtcagaatgctccccgccgtcatcttcgtcccggtctctgttatcatttaatccatttccggccttcccattatctctttcatccgaatcatccatatccttatcatcgcctgcaccgctgctttgtctcaccacattgtttctgccggatttatccctggcttttttgatatcatcatctctgtcatccgtatcgtctttgtcgtcatcatccctgccgtcatcgtccctgccgtcatcgtccctgccgtcatccttatcaccagctttatctttaccggcatcttcctccctgtcatcgccatcatcttcatcatacttatcggggtcagcatcattttcttcatcatcattttcagtgtcatccccacgctcatcctcgtccctgtcatcttcaccattgccgtctgcatcttcccccgttcctcccggaggcatcccgatgaatgccggcttatccccacctgtgcctccgggtatctcacccttatgatggggggaggctgcgggggggctgtcctttcctatgctttccacatggacttccaccggcataccatcctttaaaagggtgtccagccctgtgcgtatggcatcggcccgttttgccttccagcgctcgctcccgccggatgccgccacatatatggtccctccttcggtcagatatcccatttccatggcccgttccaccagtatacctgtcatatattctgagtttcttcccttatatgacacctggtcaatgagtttttttccgtcctcattcacaccttccaggccaactacgcgatccatataactcacagacattttcacatccggattgattctcacctccactgtaccatacggcattccgtatgcgccataggccccgcctcccaatacagccaggcacaggcaggcagctgcggccagcggagcaagacggaacaggatgggagcctttggtatctgccgggcaattatctctcctaccacctggccctcctggtaacccagattggctgcctttatcattctgcctttattgtcaaggacaatggcatatgacggatggcactccattacaagataagtcatacggttccctcctttcccggtgatatctgacacagatgtccccggatgatttcatatccgttggtataagccagcagaatggcaaccagatacgtccggtgccgttccatggtctttctggatacgccggacagctctgccagctccgcaatgggaagtttgcggttctgtatcaggtgttccagcagcctgggatggctcctggcagcctccagcactttgtggcatgccttgagggtacggtcctgccgggggcagttatccgccacatcagacagactgatgccatactcagacagattccttcggaactcatccagctcctccctggtagccgttctcacattccacagctggattccgtttttctcatcaggcgttacttccaatagggcatgggaatcatcctcctgtcctgccggggcatcaaaggaaaccaatccctgatggcgcccctctttcctgatgtagtctatgagccggttgcgtatggacgcggcagcataaggcagaaacgcccctcttccccgctcatacccctggaccgcctcataaaaggcaaacatggccacactaagctggtcctccctgacctgggttggagctccctgggtaaagcggactgtctctgcctgtatgaaattcatatactggctaatcaggctgtcagcagcttccggactcttctttgcctcatagaccaaacggactatctggtgctcttcccccaagatatcacctccatttaccatagaatacgcaggaaccatttctgtttcggggtcacaggaaaattgtttcctttttctttttatttttctttttattttcctttttatttccttttatctagtataacagaaaaaatcacttgttccatccatgaattggattgtacaagtgattttttaatatagagcacaccctcccccacaaccggagcagtgtctccctcatccatcatcgaatcatactgttattcacaatctaacccggccgcgccgtcatccgcttcatccagagcctcatttaactcctctgtgccttccagcacaaacctgccctgacggataatatcaatccggcttccatctgccctgacagcctttatatcccctaattccgagtagggaatggtgatatccgtatgacagctgaaatatgccttggacatatctgtctttctgagaagggatatctcattgtccctggcaatgacctccctgccgtcagggttatacatgggcgaatcctcagcaaagctgtagcaagtatcacccactgcaaaatgaggccccatcttttcggcaataaggataggcagcttatcgccaatggaaaaccttctggccacggcataggccgtagtattggtaccgatggcgaactcgcccaaaggcagccagtcatggtttcgcattatgacctgcttcacaagggcctggccctgtctgcgggcgtccccatctgccccagcgcccttatcatttccagcgtccccggcagcccccgcttcctcaaaattcccgcaggaatactccgtcaccttaccatccttaaacaccatgcgcagattcctgaactgataatcctccacataaacattctttacgtgcagcagtccttctgttcccttcaatatgggggatgtaaaaacctctcccaacggaatgttcacatcagacacacagttctcgaaattagtctccttttccctgtcccttaaggggtggagagccaccttcatggatgtctcattgccgtcacggcctgttatgagcacatagccggcctcatccagtgcctggatgatacactgctgtattttctggtacttctcataatccagtgtattgatccggatggtttccctgaaaacagcctcgaaatccggcccaatctctggtttgggaaaggcaatgatggtgaagctggtctcgtctcccggcatatattgatttacaatctgcctggattcattggcataagccagggtcagcgcctcctgatgggcgttgagagccagagccgcttttttattttcaggagcaaagccttcctcaccaaatgtctccaccagggcagggcccgcgcaccaggcggcttccttccggtaggtctcataggcggaccgcagaacggccagcttcctctccttaaaagcattgcccatataaagggcgctgtcataacgatggtcataatcgtactgcttgttgggagatgtgccgtaatatcccctgcgtccgttcgtcctgcggttcacggactccaccgctgccctgtaacagatgggttcaagtcccatctcccggaagtactccaccgccctgcggatcatccgctcaaagcccagctggaattccaccacaacggttcgttttttcttcaggtccctgcccatgacctgaaaccccttcctgaatccttccgtataagtggatgccatctggtcaatggtctcctggggaagactgttcatgaaagaggcaagctttatctctgtctccgaaacatattccccataggcatagagataccgcaaatcagtcaaatcccgcttcatcacgatatctgttccaaaggaaagggccggatccagtccctcccgaatccgccagtccacggtgacctccgcatagtcgctgacaaaccagtacagggaatccttaatcagctgctccagaggcgcattttttccctcctcccatgcctgtgcaaaaaggttatacacttccaggaacagctcattcagtatggtgatattcataagccgcatctcaaaggcatatacaatatcagcccggatttctgtatagagaaaggataaaagctggccgtaaccatcccccaaaacctccaccgcgtaatccggattggcaaagctctccctgtaattttcaggcagaatgtcctggtacagggcgtaattttcctcctgcagcgcctccagggtcaaagaagtcccctccagcccgtcctccccgcttaaaccggtttcttccacccgctttgccagtctctctatcctgcggataaaagccgaaaccttcttaaaataacagccgtaaggcagccccatctcctctgtatccatggacctgatacgctccatggacaattcgtagcgctcccttacggcatcattctcttcctgtaataagattctgtaatccatctgcatttactcccatctatcttacaataccggttacgataatcacagcccacacgatgaccagcaccacgcagatactgattcctattttcgccagtatgtaattgcggtccttttccataaatgagcgcacaccgtaccacagccccataagggctgcagcaaggctggaaaagccgtaagcccctgtattcaggcctccctggcccgccctggccacagacagatacatgctggccgtgcctaaagccagtcccagcactgccagtgtcagacaatagtagctgtttcttgcaaaaggatttctaacatacgataccttatcgccaatctgcctcaacgggaaagcctcctttttctcaatttgcaccgggtccattgtaccaggcgataacacagataacctgcggctgctcccagggtgttgagcagcatatcatccacatcaaagcttcccaccttgaacaccagctgcagagtctctaacatcagactgaaaacaaagccgaacataaccgtgttgtaccactttttgctgcgtctgctgataatggggagaaagaacccaaaaggcatgaaggccgccacatttcctatcatgttaatcatgaacaatgtgggtcccaacacgtcataataccggaaataccgcgtaatttccttaaagggcaccagattatactggtaccccctgtcagtgtctgtgcgcccgaaggattctgaaaaaaacatgaaatacgccagaaagcaaagatacagtatgaataatacccagcccagcttttgacgctttgttgtatttcttatcattgtcagccccgcttactaaaattcaatttcggattttcgtttcagcagcagcgctccatttacaatggaaatgattccaaccgtaaggccggtcactgctatgatgactcctaatgctatgcagccagcccctgtgttgcgcatggttttatacactctctccatattcatcgcctttcttcctggaaacatcattatgcctgggctccatactgctcatagtaagcgtcgatggctgcctttatctgatcgtcgatgactaccttgccatttatttctttattatagaggtgctccaccacatctgccatggaaacgatggcggcagtggggaaaccgtataaatccttaatctcatccagagcgctcctggtgcctttgccgcgctccatacggtttaaagaaaccatgagtcccttgatttccacatctccctgggccttgatgatggggaatgtctcctcgatggacttgccggaagtggtcacatcctcgatgataactaccttgtccccgtccttgataggactgcccaaaaggatgcctgtatcgccgtggtccttgacctccttgcggttggagcagtaacggatgtcttttccgtacagctcactgattgccatggtggttgccacgcttaagggaatccccttataagccggcccaaagagcacatcaaaatccagtccgaaattgtcatggatggccttcgcgtagtactctcctaattttctcagctgggttcctgtgacatagcttcccgcattcatgaaaaacggggacttacgtccgctctttaatgtgaagtcgccaaattttagcacactgctttccaccataaaatctataaattcctgcttatagttttccatcttccttaaacctcctgtatttacgggccgtttaaccgctctgtaattcttttgctgctgccttttttaaactgcctttgtcactgtcttttatcactgccttttatcactgccttaccctgccggtgctacctcacagcccctataaggtcccggatatctccgataccgtacgtttccatatatgcccggattccatccacagtctccaccgtggcataggggttatggaaattggccgtgccgatggcaacagccgtggcgcctgccagtatgaactccagggcgtcatctgcatttctgattcctcccatgccgatgataggaaccttcactgcctgggcaacctggtataccatgcgcacagccaccggcttcacagcaggaccagacagtcctcctgtcctgttggccagcgcgaatgcccttttgtgaatgtcaatcttcatgcctgtaagggtattaattaatgaaatggcatctgccccgccagcctctgccgccctggccatgacagtgatatccgtcacgttggggctcagcttcatgatgatgggctgccttgcatgtgcctttacctccctggtaatggcctccaccgcctttgggtcctggccgaaagcgataccgccttcttttacattgggacaggatatattaatttccagcatgtccaccggctggtccccaagacgctccaccacatcaatatattcctccgtggtctttccgcagacattgaccacgattttcgtgtcatactgttttaaaaagggaatatccctctttgtgaacacgtcaatgcccggattctgaaggccgatggcattgagcatgccgccgtatacttccgctatcctgggagtggggttgcccggccacggcacacttgccacacccttggtaaccactgcgcccagacggtttaaatccacaaactcactgtattccatgccggaaccaaatgtgcccgacgcttccattaccggattcttaaattccacaccggcaatatttacactcatattcatctaaacggtacctcgctatctttcacctatacatgcctacagctcaatctcatccgccctaaacacaggaccgtccttgcatatacgcttattgtgtacctgtgaatggtcatccacctctttggaccggcacacacaggccagacaggcgcctactccgcaggccatcttctcttccagggaaagccagcactccagccccttttcggccgcatatgccttcagtgcccggagcatgggagtgggaccgcaggcgtaaatgacatccgccgtaaggccctgctcgcggatagcgtccagcacatttccgctggttccgaagcttccatcctccgtggctgcgtataccggaccgtatgcctcaaattcatcctttaggaacatctggctgtctctgtatcccagcacggactggaccagattgtcctcttcgtccttgttaagctcatgaagagcttttgccagttccagcataggcggaacaccgatgcctccgcctatcagaaatgccttttttccagcctccaggggaaacccattgcccagaggtcccaggacatcaatggtatcgcctgccgtgagcccggaaaactccttcgtgccttcccccgcaatgcggtacaccagcctcagctctcccttttccttatcaatgccgcacaaactgatgggacgcggaagaatcctggccccgtcttttgaataaagggatacaaactggcccggaactgctgactccgctatctcaggcgcttttatcctcatatcgtatatatcggcagccagctgctcctggagcgtgacggctgctgttattttcacttttgccataacatgaatctcctgtctcttacagtacgctgctgatatcagcaaccatgtcaatcactgcctgtctggatgcctcgccgaagtgctccggcccgaagttcttatacttttcctgtttgtaagccgcaatgattcctctggaggagttaaccacagcgccaagcccgtcctggttaaaacaatgcttcaggtcagcggctgttcctccctgtgccccgtatccgggtaccaggaaataggtgtggggcatgagctttctcagaatctcgctcatctcaggataggtggcacctacaacagcgcccacattgctgtactcaccgtccatacagccggcaccccactcctccactttggcggccacccactcatagaggggcttaccgtcaatcaggcggtcctggaattcgccgctggacggattggaggtcttgaccagaacgaaaagacccttgtcctcactcctgcatacatccacaaatggcttcacgccgtctgttcccagatatgggtttacagtaagtatatccacattgaatccgcttaaggatttgcttcccacctgcaccctgccaagatggcctgctgcataggcagcggatgtggagccgatatcgcctctcttggcgtcgccaataacaatcagtcccttttcatggcagtagtccacagtcctcttatatacggtcagtccttcgatgccgaactgctcatacatggcaatctgcggttttacagccggtatcaggtcaaatgtatggtcaatgatttccttattaaactgccagatggcatcagcagccccctccagagtctctccgtaagcatccagggatttctttaccacatgttccggcacataggacagcatgggatccagtcctacgcagattggggcattggttttctttattttttcaattaactggcttatcataatgttctcctttgttacgagtttttcactttgcatgaattctttccccattttatcatataaagtaccttgtttcaaggaatgatattccagtattgcaattattttaacggacccgtaaacgaaaaaaacgccggacagggaaaaccgatgtgatatcagttcctgtccggcggcaaatcccaactcaattcctatacttctgtcatacactcctccctgaaacgaaatccccatccgtccccttccctgggactggcaaatccgttttctatctccatggcattatctatgatgccgtcaatccagtcaaaggactctgctccataaggactcctgaccgtgcacagcagcgggacatcgtaatccttataataatggggcaggaccggcaatccgaaggcctcagccagggcagcggattccctccatgcctccacccctcccagccggacgatgtccggctgccataaatccagggcgttgcgcactgaaagctgttttaaagcctcaaaatcatattcccgctcccccatggccagcgcaatgccgcactggtttctcaaaagctggtatccggcatagtctgtgtggaccaccggctcctcaaaccattgtattcccatggaagaagccctgcgggccagctccagcgcatccggcacattgagtccctgattggcgtccatcatgattttcacactgtcccccagcgcctccctgcactttgccagacgttccgcatcccgttcgatgcttcccgaaccaaccttgattttgacggccttaaaacctctctttttataatccagcacttcctccagcagttcctggtccgtgtaggaaatccagccgccgctgccgtatacaggtatccttctccggttggcccccagcatcttccacaccggctggcggcatgtatgcccccaggcatcccacatggccaggttcacggcagcaatggcgcagttgttgattcccgtattgccaaagtattccgcctcccggtcccagtcagccctggccagcactgtatcatatacagcgtactctcccgcgctgataaagctgcagacatccctgagcgctccctccattgctcccggagaatagtggaaggacagcacatacccctggccccttacgccctccgctgtcatcagctccacaatataaaagccgatttggctgattgtgtgtgtggaatccgcaatgggtctgctgatatcagacacagccctgtaaaaatgtatatcctttatcttttcttttacattcattttacctgcagtcatgttctcaccatccaaagtattcttttacattcctgtagcatattccttctattatttccttcagatatttctcgccggagaaatattctccgcgctccaccagttctcccagatagctgcagagacagcggcggtaaagctcatggcgcggataacttaagaaactcctggaatccgtcagcattccaacggacaggctcaggggatacagattccctgctccgccaaactggcgcatgatgccgaagggctggtcgttgaaccaccagggagcgcccagctgtaccttcccccttaccgtgccgtcgcagaagcctgctgccagaacggcaaagggttccatctgcgcagggtttaagggatacagaattgtctttggaagctgatcaagctctgtcagccggtccaggatacgtcccacggattttacggacgtggagtcatccacacagtcaaaacctgtggactgcccgatttcctgcaccttcctgtgattggcgtccagataggtaccgatatgaagctgcatcacaaaatgatattttttatagagctttgccatttcaatcaggaacgcggatttatacctgtttatttccacctctgataactgctccccagccgcagccttttgaaaaatgtcctccgcctgggccccggtgtattcctcccacgcaatgtgggcaatgccgttgtcgctgaccgttgttccaaattccgcaaaaaatgccagacgttgttccagcgctcccatcatggaggaaaaatccacgatttcctgccccgctgcctgggaaaggattttcatataatccgaaaatgtcttccgctcgcagtaaaatgccctgtcaggcctgaaggccgtgagaatgcgcgtctttaaagctgcattctcctttattttcatgtgatattccaggctgtccgccggatcctccgtggtgctgagcagttctaccccggaccgttccagacaccatccgggcgtcatgtgaagctgcctgatccgctggttggtacgccggtaaatctcctccgcattatccggtccaaggggttcctctatgtcaaagtaccgcttcagctccagggcgcaccatatataaaggggattgcctgcaagatagggcatgatctgcgcaaatttcagaaatttttcatagtagctttttgttccggtgatatactcctcgctgattccgaatgtgcgcatggccctccatttataatggtcatgagccagccacatttcacccaaatccttgaactccctgttttcacagatttccctggcctccagatggcagtggtaatccacaatgggaagcctctccccatagctgtggtacagccggcttcccgtggggtttgtcagaagaaactcctcggaaaaacaatcagaacccaatcagagcacctccatccaccggcaggcaggtgcctgatatgtatccggccgcgtcactgcttaaaaatacggcagccatacctatatctgtcacgcttcccaccttctgcatgggaatccgtcccaggattttccccaaacggacctggtccccgtccgtggccttatggaacatgggcgtatcaatccatcccggcgcaatggcgttgacgcgcaccccgtaaggaccgccttctgctgccagggtatgcaccaggcccagataacctgccttggccgtggcatagcctgccacctgcggctggccgatgtagctggtcatgctggcctggaacaggatgcttcccttcccctgctccttcatgtgggggaacagtgcctttgtcagcgcaaaagcgcccaccaggtgtacgttcagcacgtttacgtaatcctccaccgtcatgtcctcaatgtatttcttgcaatggtttcccgcattgttcaccaggatggtcaccggcccctgctctgctatgacccggtccgccatctcctgggtatggtctgtgtccgttatgtcaaactgataaaacacagcctttcccccaaactcctttaaggcttcccgcccctgttcccggctctcatagctcagcaccgccacctttgcgcctgcccccaccatgcacctggtgattgcaagccccagtccggtggtgccgcctgtaacaattgcggtctgcccctctaatgaaaaataacttcctgtatcaaacattgcctatgcctccctgcattttttcgttgcgtccctgtcctgatatttatacggtataaaatactctttgtggcccagcacctcgcttttgctctttgtgccggaagccacctctgccgccattttgagaagcttttgtgccatctcatcctgagagcagcgcccctccagcaccggcccggcgtcaaagtccatatcctcctccatggccctgtaggtagcagagtttcccgtgattttaatacagggaaccacagcggatcccaccacatttcccctgcctgttaccagaaatacaatatggctgtggcatgcagccaaatccatcagcccttcgctgtcattgggattggtgattccaaactgcatccagtatggatccggcgtggaatccaacagccacagaccgggatgaggcggcttaacccccaccttaagaactccctcaatgggtctgcttccgctttttatgagggctcccatgcttttttcttcaatggtggacagccctcccgcaaaattacccgggctgaccgaatactggcgcacggatttgcagtactccagggccttatcatatgtatccccaatctcctgcctggccctttcatttgcagcgcgccccaccagcatctccttaaggcctatggcctccacgatttcctcaaaaatggccgttccgcccaaatcggtcagccggtcgaaaaaccgtcccaccaccacatttccggccagcccgctggtgtaatcagaccctccgcactctgcccctatgattaaatcccggattcccatgggttttcttttggtatccttaagccgttcccgcatcagccccacaacagccaggcccttctctatggtctttctggttccgccctcctgctgaatgaacatccaggcggcttcctttccctccttcccggctatgtccgccagccattccggctgcacatactcgcaccccagcccgactgtcagcacagcgcccacattgggagggcgtatcagggcaatcagaaggcgcaccgcatattcattatccgtacagcccgaaaatccgaccacctctgtctccgggtcccctgcaagtcttacgatttccctggccacaaaagaagcgcactccacggtgtagatgaccagcaccttattgcgtattcccattgcgccgttcttcctcacatagcccatccagctatattcccttttaaggttatccatcgcctgcctcctactcatatctggtatccttgggcgctccggtcatcacgtccaggtggctggagcgctcatcgtacacgctgcggatattgtgaagatggacccattccccggcccttatgtcctttgatgccctggcaatgcgcaccccgtattttatgacatcctccccggcccttatgttttggagagcgattttatggccttttggtatcttctgaacagcctcggcttccctcatgcatccatcgcccagaagccttagcgcaccggggatgagctcctccagggcagtggccacattgtctttttgttcaatctgaaatgccctttgcattatttccattgttccatccatccggcccgtcgtccctcctctacaaaataccgaatttcgcaaatgcatccgtggcgctcataccgtcctcgatggcctttctcaccgtcttttccccggcagcctttttaagggcctttataagtacctcatccgctgcttccctgggaatgaccagcactccgtccacatcaccgaaaatcaaatccccgtcatgaatccttacctgtcctatctcaatgtcgcacctaaaatccaccacctgggtgcggacgctggaatcctgggcataacagccgcaggaaaataccggccagttctgggacagcacctggggcgtatccctgtgccacccgttcaccacggcgccggacgccttcctggttctggccgctgcagtcagaagctccccccagtaggcgcaccgtttggttccgcccgcagcaatatatatctcattttccttcagctggtccagcgcctccgtcagaagcccaaagggctttttctgcggtccgtacacatctgtcatcagcacggtcatggcctttcccgccagcttcatatcctcgcgcagaggccggatatcctggggcagaaactggtgataatatcccagttcgtccagtatatcgcccaccacgggtgtatagagcttctccctcatcagggcgaatttttcattttcatcattccacaatttcatgacattacctcctctgctaataaccgaagcttaaagccccgccgtccacggcgaagtcctgtccggttatatactctgattcatctgacaccaggaacttgaccatggcgccgatatccctgggattgccgaaacagtgcaccggcattctggccagtattttctgcttcctctcttcgtccatgaccttgcggctcatctccgagggaaaccatccgggtgcaaccgagtttacattgataccatcctgggcccattccaccgccagcccccttgtcatggacagcacagctcccttgctggtacagtagggcaccacctccgaaaaccccagatgggctgccatggaagtgatgttcacgattctgcccctgttgggagactgtcttaaataggggtagcacaaggtgcacagcttaaacacactgcttacgtttacctggagcaccttctcaaaatctgcgtccgaaacatcctgcgccaggctctttaccgtgattcccgcgttgtttaccagaaaatcaatgccgtgttcacggccgattctctctgttagttcccccatctccttataatcgcttacatccgccgccagatgaatcacattttcatggctggtctccccttccagcttcggcctgccgctccggctgacagcatacaccactgcccctgcctcagccagaacattggccgcggcaaacccaagtccgctggatccgcctgtaataattcccgtcttacccgccaattccatcattccaacacctccatctgatgggaaacacaatttcgttcaatcagctcccagtccagttctccgccgattcccggcttgtcaggaactgtaattatccctttctcatcaatgggaagaagtcccttcatggggaacatgaaatcctcttccggcacaaaatactcaaaatatctgcaattgcgtatggcgcaggaaacgtgaaggtttaccaggtccatgtaattcatggtcgtggtatgaatctcgcactgcattccgaagctttctgccaggtgtgctattttcaaagttcccgtaaccccgcatttccatgacacatcggccctgacaatatccgccgccttctggttgatgacctgcgccaccccccagtgacatcccctggtagtctccgtggcggcaatgggaatatccagggcggcacacagctgggtatatttgttcagttcaaaatcccggaagggttcctccagccattcataccccagcttctccaggtgccttcccaccctgactgcttcttccagtgtatattccgccacagggtcgctcatgagcttcatatccggtcccactgccttgcgtatattctcgtggatttccatatccagctcacagggaccggagggatgggctttataacagttgactcccctggatttgtaatagagagcctcccgcacatactcctgcgggtcctcatggaacagcccgctggcatatacaggcagagaccggcggtaggcgcctatgtattgatagagcggaagtcctgctgccttggcgcagatatcccacagagccacatccaccgggcccggcagatatacaggaaaaaaggtcaggtgccggtcaatgttccacagctcatgccatattttttccctgtcatagggagaggcacccagaaccaccggagcaatattatcgtgcagatagctttccgtcacccggcctgaccgcgctgccagggctgttgcgattccctcgtatccgttatccgttgtcagcttaagcaccaccacatcccaatccatactgctcctgccatgattcccttgataaaatatttctgcatggacaaaaagattgccagcacaggaatcagggacaggataatggttgctgtcagggtaccgtactgccacgaagcagcctcatcccgcaggaaggtgatgcctactgcaagggtctgggattttgccgtggtgcacagggttctggcgtatgtaaactctccccacaccgagataaatgtcatgatgatgaccgtggcgattccgggcttcacgatgggcagcatcacacggctgaaggtctgccactggcctgccccgtcaattctggctgcttccatcatctcgttgggaacgccgttaaactgtcctctcatgatgaatacggacatgggcaggttggttgcaatatacggaagtatgaggccaagcctggtatcaatcaggtcaaaacgcgactgcataatgtaaatcggtatcaggtaaataacatagggcagggtgatgattagcagaacaaatccaaggaacaggtcccttccccaatactgaaacttggaaaaggaatatcccagggtggctgcgaaaagcacgttgaacagcacgctccaaaaggataccacaacggaattggaaaaatatttaaagaagttgcccagttttgtaaaaatacccgtatagtggcccagatagggatttacaggaagaaaggtaaggactgacgaatatatctcttcatccggctttagcgaggtgagcatcgtccatatgaagggaataatgaaaataaaggatatgacgaacagcaatataaacacggctatgctgccggcgtttttcttaatactcatgccctgttcctcctttttccggtctttttccgtttcacttcatcctcatcctttgtcctgttgatgtaaagattgatacatgacaagatcaggataaccgcccccataaaataaccgatggcagacgcatagcccatctcgtaatatttaaacgcgttcatccatgtgtactggtatagaaccagggtggatgtgcccggcccgccgtttgtcatgacgaagggctgttcaaacaccttcacggactggataatggcccacaggccgcagattacatagctttccttcagattaggcagaataatcctgaaaatcctctggaatgcattggccccgtcaatcttggcggattcgatgatatccgatgggattcctgcaaggcctgccataaagaaaataacaagcattcccatatttttccataagctgacaattacgatggaaaacatggcccattttccttctcccagccagttgtgggcccatgtgtccaggtgcagcatttccctgagcacgctgttgagaaggccatactggttgtttaaaatccactggaaaataatgccggtcagggaaagcggcaccaccatggatacaaatacgcaggtgcgaaagattcccgatcccctgacgcccttgtctaaaagcatggcgattatcagggaaataatcatgatggacgggaaaaacagcagcgaaaataccacggtatttctcagggaatccataaaatatgcatcggaaaacatctttgcaaagttggaaagacctgcgaataccggcttcttgtcaaaggcaaaattgtaattggtaaagctcaggtaaagcgagcgtaacagcggataccccatgtaaacagccacaaatataacccccggagctgcaaacgcatagccgggtatcatctttttcagctgcacgcccacactttttttattccccatattccacctcatcctatttctatgataccggcaggaaaaccggccaatgcaaagactgtcattgaaccggccctgccggctggttttatttgttcatacctgtgctcaggtcaatggtcgtcatgaacttactcatattggcagaaaactcatcaaccgtggaaccgcctgacagcatcttctgaagctctatctgcatgttggtatccagctttgtgtagtccttgtacagaggaggcgtcgttgctttttctgtgaaatcaagtacggttggccaatatggattatccagtttctcgtaatgggccttcatgggtgacatcttgccgtaggaattcatggaatcagcctggaactgttcctgcaaaagcttatccttgatgaatttaatggccagctcctggttttcagatgccttgggaataacggcgccatgtatgtaggaaacagaaccatgggtatctgtgcccggtatgggcataacgcctacattctctgcccccagtagttcccctgcctcaatccatctggatgccggggcaatgtgcatggctacccttccggccttgaaatttgtcctgtttgcatcggcatccgcgaatacatccgtggtggtatagccgtcctttactaaatcctgccatacctggagcatgtttttgacgggcccggccgtgaagttcaatgtatttccgtccgactcgtacaagtttccgttggctcccatgacgcatgcgtcgtaggcctttaccgccatgttgttgccccagtcaatcgccaggccggtctgtccgtcctttgtcaggttctttgcatattcgtacatctcattccagtctgccggggcagtgacagtctggtcctctgccacgtagccggcctcctgcatcatcggtatatttaccacgcatcccaagacttctcccagcagcggaatcatgtactgtactccgtcagcatttccgctttccagaaatgactcgatgaacttatccttggtaaaatccccgttaaagaagttctcgtccgtaaactccaccacataatcattggcagcgtacggaaccgtctcagagcggtcgccgcccaaggctaaatcgcagtttgtctttccctgggaccactccagcatgctggaggtcacgtccacattgtccacctggttatagactacttttacgcccggattctcttcctcaaattcctttgcaatcctctcaaaatcatatttccccatcatccacgcctgaacagtcacccgcagggtctgccctcccccggcctcctttgtcccgctgtctgaagcttcagctgctccagtccccgggtcagttgaggaagaaccgcacccccacagtacggatgatgccatgacagctgccagtgccaacgaatacgccttttttgtcttcataataaacctcctgatacattttagtgaaacgtttcccttatcatattttcatcttactatattattctgccagtgtcaagatgcggaggttgactttattgttattttgcataatttttcggtatttttttgctattttatcattttattaacatatacttaacatgttttcatattatcttttccgccgtcccgtttatcctcttcgcgtttccgagaagtaacgtttcccttattccgcaaaaaaacgacaaaaaaggggatggtgcaaaaccagattggttacctgattttgcaccatccccttttttgatttagatgcaggaaatccatttaaataaaccgccccatcaaaacctgggacggcggataggttcattcaatttgagacagataatcactaaaaattttataatgcagtttttcgtctaatgataaccttgcaagcattttagaaacatgagggtctttgatttcttttgattgggccgcgtatgcctgagctgcaaactgttctgaccgggcattatcagacaatattgcagggagttcacggctgtaacttaccatattcccgcaccaataggaattgggcctggatgaacggcattcgggctggcctccaagaaggtgaatgagctgtccgattatggaaaagtggtgctgttcaacgatggctatgcgttgaatgacacggcggatgttttgatgacgatcattgatggtccaggattgatacagatactggtgtaccgtggtcatttcgctggcggttgaggctaaatccgccataaggatctgggcgtattgctggttcttttccagaacagcaacgggaggataccagtttgagtgcgcaaccggaaaagaatccgggtttgcgcggatattatattgaatattgttcatgggacattctcctggaaaaagctggataggtggttttttaatctttatgagaaagaatccatcggtagaacgccattgaataaaataaatcatttatagtttagcttttcatgccgatatatagcatataccttgtgtgctggtttggcatactcacacagggcggggacaaataccggcaaacttgtccagccatggttccggccggtaatttgttcccatggttctgctaaaaatagcgtaaaagggggaaatatgcaaactatttttatagtcaaccatgctgttgagtgggagagtataatcagcgatgaatggctgagaccggaaggagtaacagagcagccatacaaacagatgatttgcagaatgcatagactgccatgcccccagtcaccagggcatggttactaaggagagtcgatttatgaattttatgaagaatttaaaaattggaaaaaaattaattgttacatttggagttatcattatactttttttaatttcacttatggtatcaattatgagtctgagcaactccggtaagaattttggagatttctacacagtgggatacccggtttccaataagacaaccgatatgtgccgtgctacccagacaggcttaaagtgtatagcaatcagcatgcttacggatgatgttgctgaaacacagaattatattacccaggccaatgaacaatttaatacattgtctccgggattcgactatttacggcagaatttcagaggtgataaggcggtgcttgaccaggcccagaacattctggaagaggcaaagccataccggatagagattcttgacctggcaggacagaataagaatacagaagcggctgacctgctttttactaaataccagccattaatgctggaatttatgaatttaatgaacaaagctgattctgataccactgcgatcgcggccgaggactattctcagtccgccaaggcccagacctctgccctggtatttctgatcaccatagctgcattggctctggcactgacggtcacacttgccatttatatcacaaaagccctcaccaggccaatcagcgagattgaggaagcagctaaaaagatgtctgcgggagatcttgaggtgtcgatcagctacgtttcagaggatgaactgggcagcctctctgagagcatgaggaccctgacccataattttaaggggattatacaggatatgggaatggggctgtcggctctgggtaatggggatttcagtgtggattctaaggccaaagagctttatgtaggcgaatttgcacaactggcaacatccatgtatcagatcattgacaagctttcatctgtattgggacagattaaccagtctgcggaccaggtggcatccggcagtgaccaggttgcgtccggttcccaggccctttcccagggagccacggaacaggcctcctcagtggaggagctggccgccacgatcaatgaaatctccaatcaggtgaagtctaacgcggagaatgcgcacaatgtcaacaagctggcagatgatgtggggctaaagatgacggagagcaaccagcagatgcagaccatgattgaagcgatgaaggaaatcagctcctcctccagcgagatcggaaagattatcaagacaattgaggatattgccttccagaccaacatactggcgctcaacgcagcggtggaggcggcccgcgcaggagaagcaggaaagggctttgcagtggttgcggatgaggtgcgtaatcttgccagcaagtcagcggaagcatccaagaatacggcggcgctgatagagagctccattctggcagtggaaaagggcactaagattgcagacgagacagcccacactctgttagagagcgtggaaggcgcccagaaggtaaccagaaccatagaccagatttccagggcatctgaggcgcaggcatcctccatcagccagataacccaggggatagaccagatctccaatgtggtgcagaccaattcagccaccgcggaggaatcagcagcagccagcgaggagttatccggacaggcacagattcttaaggggttaatcagccagtttaagttaaaggatatgggaagcgcccccatggtgatgcaggatgttccaagacagatggatccaattcccgtttacccggacggaagtaaatactaaacagcagctttgaccaggacaggggcagcatttatgaaggaaacgctgcccctgtctttttgttttccggcttcagccagttaagtccgcggtttatgtccgcatatactgcatgtccttaatattttcccagaagtagtttacattgctcttaaatatcagtactatttccaccctgcgtaccttttccgctggttccttatccatgagcaggtactcataaagcatcttgatggcaagatatgactgcttacaggggtccttgaacaccagattggtaaaggttccttcctttaaggccctcaccgtctcatcaaatacatcgcttgcaatgacgggaatcctgcctgccatcccgcttttctttaatgccctgtacaggacagcgctgcctctggaaaacacgcagcaaatcagatccgggggattttccttcaaaatatccagcacgtttttatccagatggtctaattcataatagccgtataaatcctcaacagcatactccttcttctcctgccgcatatattcgtgaaacccttttgccaccagataatgggaatccttataggggtcacctgtcatcaggagaatgcgccggcccctggccaggatattgcaggcctgttccgccatgagctgtcctgccgcgtaataatctcccaccacggttcccaaatggccgcaccggtcctggtcttcggtcacaaaaaccacaggcagccctttatctgttaagtatctgactgcacagattcccttttcgtctcccggcggaaccgtcagaagtccgtctaactcctcccctgccttcaccttttcacataatgtttccagtgtccgggaaagttctcccttttcataggccagctcctgaatctccaggttaaactcgctctgttccgccagatacattctgtatccctgccatatatagctgtagaaatacttgctgtcctgatccagtttgggcaggcatactgcaattttcatatttttccgtttcagcatggatgccatggcgttcagcctgtaaccatttttttccgcataggatactattttttttctggtagcttcactcaccccgggctttccataaatcgctttatggattgtattaagggacacattaaaatgctgtgccatatccttcatggtaatctgtgatttcatgtggttttcctcgtcttctcataaggtctaattatatttaaaacaagccttacgatatatcttatacaatccttcactttttttcaagcccgcaggcagcaattccatagaatgcacagaatccggtttggggaaatcaattttggggaaatccgttttgggaaaatccgttttattccagctgcatcagacagcccataaaaagaggaaagttctgtctggtatctataatcatatagaaaaacggtctgtcaaggaaaacctcctttggttcctctgtttgaacggcactgccctccgatacctcaactgccgtcactgcccctgcttttgtccctttttcgtccacatcaattttagtcttgtgaatcactttgcttatataaatattatcattatctgaatgggccatggaggaaaaatccgctttttggctgtcaaatgcatctttcattccggattccgtcagggactcgttgagaaccacattgtattccactgtaaattttggcaatctgacacagacggttttattacgggtctgttcaagaagatctgtaatcccattttcctttaacctctccaggaactccttcatcgtcataccctcatcaggcaggaccgcggcaaatgcataggcgccgtccccatatggttttaggaatcccctccccaatgtattttcaagatagactgcttctgtggaatacatgaactccgcggactggtgttccccgttttccgcgttaaatgttcctttatgtatctggttctttttatagatatcccgccattccccgtcaaaggacagcgcattgaccaaatacataaccgcgtcccggggcggcgcctcttccagcagtttctgaatcatgccgttggtttccttctttacccagctgttgatgtcatcccttgttcccgcgtcaaagggagcctcaaatatagatgcatcgtaataattccggctggttttaagaaaatcctcatttatagccaggctgtccctgtccctgaaccatatggaattcgctatgttgacctggcaggcctcgctgttgggcatataatctgtgtatgccttcagataatcattcaggacagccgtatccgtatgcatcatctgttccatctgcgcccgcgtgctgccctccgctccatttgcagtcattcccagggcggagacaatggaaagaggcgaaatcaggcaattgccatgggacaggttttcactcagaagttccagagaaaattctgtaagttccttccgtggatttacagattcataggatggctccatcatatccactgtctccacttcttccttgggtatattccgggtaagatcctgagtacccttatgaaggccatttaaagcacacccggatgtgagcgcagataaaaatatggctgtcagaagcagcccagctcccagatacttccttttccttttcgttatcatttgcatcaaatgtttcatcatattcccctccctgccgcagatatgcggaaaccttatgattactttaccatatccttccacgttttactttaatccctgcttacggttctatgttttttctctgaaggccgcaggaaatgctgcgtacaggctgcaaatgctctcttaatatacttcatactttttttataattttattagcactcacctcttgacagtgctaacaatcgtgctataatacaagcataaagcaaatgaaaccaaacagttctatgagcgaggaggatataacgatgatgttaataccaagaagaaactacggacttaatttatttgatgactttttcaatgacccattctttaccagcgcctccgaaaagggtgaggaggccaagaagcttccggtgatgcgtaccgacatcatggagaaggatggaaactatattttagagattgaacttcccggattcaagaaagaggatatcagggcagagcttaaggacgggtatctgactgtcagcgctgatataaccaagtccagcgagggcaaggatgacaagggcaccctgattcacaaggagcgctataccagttcatgtaagagaaccttctttgtaggcgagcagattcgccaggaagatatcaaggctggttttgaaaacggcatactgaggcttcaggtgccaaaggatgcgcccaaggtggaggagacacccaagtatattgatattctgtaatcatcattgaatgcccaactccttttatatatatattatccctaataacggacacagccgtgaatcccccatcccggctgtgtcctttttagttcttttatattctttctttcatcctatgctttccacaaaagccggtcctccttgatggttgccagcaccctgatatttcgtatctcatctgcccctgtttccagaggattctgttccagcaccacaaaatccgcctttttcccgggcgtgacggttcccttctcattttcttcaaaatactggtatgccccgttgaccgtcactgccttaagcgcatcccgcaccggaatgcgctcctccggtcccagcaccttaccttccctggaacgccggtttacggcgcaccacagagtctccatcatgtccggcataataaccgggctgtcctggtgcagggtgaaacagatgccctccttcagggccgatgcagccgggctgatgcgtcccgcccgctcctgaccaaaattgcggacgtggatgtccccccagtggtatacatgggccaggaaaaaggagggaatgatttccagtctctttacccgttccagctgatccagccccagaagctgggcatgaatcattaccggacggatatcgcccctgtaaaaaccaggcttcctgctgttcccgctccccagttccctgtaaactgcctccagcatatccatatactgctctgccgccctgtcaccgttgcaatgggccagaagctgcatgtcttccagctctgcctttaaaatattttcctttacctggctgtcctccagggtattataaccgcagtaatcctcttttgttgcccgggtccggggaaatgcatccgcctgtgccttttcctccatatccggtgtttccggcagatagggcgttcgcatccatgccgtccttccctggggcgatccgtccaggaacattttgtacccgcctatcttcatatgccccttatagttctttatatggctttcaaatgccgtccgtgcagcatcgctgtcccgtatatccataaaggaaattaaatccagctttaaaagtcctgatttcagcagcatctggtacagcggcaccagctggcttgccatcagtccctcctggaccgtggtgattccataggaagcatagagctcctgggcgcggccgtaggcagtcaggaaatcttctgccgacggcatggggatgcgtccctggaagcccaaaaatgcattttcctccatatatccggtgggaagcccgccctccatttctatgacgcctccctgaggcgcctgtgtctgtccggtcacacccagaaggttgagggccatggtgttaaacacccccatgtggcctgactggtgtttcagtatcaatggattctgaggcgctgcctggtccaggaccttcctgcgggggtggctgtgttccttcagacggttgtggtcatatccggacgcagtgacccattttccctctggaatcttcttatcttcaatgtattgccggatgcatgttatcatgtcctcaaaactgcccgccccgcccaggtccacttccattgtgtggctggcgcaggccgtaaaatggctgtgggaatctataaagcccggcatcatcacccttccctgcagatccagcctgcgggccttatcccctgctctttcctttaccttttcccatgttcctgtctccaggattcttccgtcttctgtcagcacggcttccacctgggggcatctgtcctccatggtaagaatggtgccgttatagtaaagcgtctgcgccatgtcctgtcctcctgttctatgaattgactttccctgtttttcttagtatagtacctatattatcactggtacagcgtatcgcaggtccttgtgcacacggcgcccgctatccgcagtactaaaagtatgcacataaaaggagtttcttatgatatgcaggtgtattacatggattaaaaagcagcctgtcctctcactctttttcctgatactgatgtatctggtgattggagccacagctcccttctatcactataagccaatttcccaggaaacacaagatacggtatcggctgagaacttctatcaggagggagacagccgggaccgcgccatgatactggaaaccaatcagagcgcctgggatgaacggatgcgcctcatgaacctggccagggaacggattatactgtccacctttgatttcagggatggcgagagccccagggatctgatggcagtcatgctccacaaggcggaccagggagtcagcataaagatactggtggacggtttctccggcctggtgcgcatggagcccagcaagcttttttatgccctctccagccatccgaacattgaaatcaagatttacaacaaaatgaatcccctgcttccgtggaaaacccagggaaggatgcatgacaagtatgtgattgtggatgattatggatatatactgggcggccggaatacctttgattatttcatcggttcctatcccacggattccagaagccatgaccgcgaagtcctggtctacaatacagcccacggcacagacaggggaaaggacagctctctgtatcaggtggaagattactttgagcaggtatggaatctggatgtgtcctccctgttccatgacagcgaaaagaccggtgacaggacctctgtccggaacgcggcggccatgctgagggagcggtataaggtcctgtccatccaatatccggatctgtttgacagtgaggaggattctgccagctgcaccgccgcgcccggccagcccggctgtccggccctgcccatggattcaagtatcaacgatgacgattaccccgccgccccggatatcccggacgccccggataccgctccccccctgttcccggccttatccctgaccgccaatcagtcaaaggccctggagtattacggttccaacacggttcccacggggaaaatcaccctggtgtccaaccccaccggcatctacggaaaggaacccgtggtctttcacaccatgtctgttcttatgaaggacgcaaaaaggagtgtgctgatccacactccctatgctgtattcaatgactatatgtacgataccatgaaggaaatcacggctcgggtgccggtgaccatgatgattaattcagttgaaaacggcgacaatttttttgcctccagcgattatcccatgcacagggacgcatttggggatacgggcatggagattctggaatatgacggcggtctctcttatcatggcaaatcccttgtcattgacgatgagctgtgcgccgtgggctcctacaatttcgatttgcgcagcacctatctggacacagagcttatgctggtcatccagagcccggagctgacagcccagctggaagaatacatggtctcctaccagaaggactgccgacgtctcctgccggacggaacatatgaaataccggaacatctgaccattgcagatgtcccggcgtataaaagggcggcctggaaggtggtgggctttgtgatgcagcccttccgcttccttatataacctttttatccctccattttcctgtgaggtaacggctgaaggatatgacataattggcaatccagcccatggggaccgcgtaccacacggctgccacgccccatatgggagcaaaatgaaaggctgcgtagacacgtatggtcagattcaccagattggcaatggtaaataccagcacatccccggagcctcgcagaactccgtccgtacacgccttcataccgatgaacacaaagaagtaggcgataaaggacaggtatcccgtgcccgccccataggcttcccggctcatgccgtctcccaggaaggaggttatgatcgggccgttaagaagcaccactatcacggctatgatggcggagaaaccggccacaatgccgtagctggccctgtacccctccttcacccgctccatcttcccggcgccgatgttctgggccgtgaaggtggctacggcgttgcctgttgcaatcatgggcaccacgcagatggactcaattctgcttcccgctgagtaaccggccagggcagcggagccaaatccattgaccacggactggaccagcagcattccgatggatacaatggactgctggagaatggacggcaccgcgattctggtccctgcctttaacatgctgctgtcgtagagcctgaaaccatccccgtcctcctgctcatatccccttaattttttcatcaggatgccgaaggatatcagggcggatattccctgggccatgacagtggcaatggccacaccgtccacccccatccccagccatgtgacagatataatgtccagaaccacgttcaggatggatgaaaatatgagaaggtacagaggcgtcctggaatcccccatggcattgaatatggcagcaaggacattgtacataaacaggaaaggcattcccaggaagtaaattcccaggtacagctttgcctggcccatgatattggccggtgtcttaagagactccagtatgaggccgttcaggtataatcccgcgctccccagcagaatgctcacaaagaggaaggtgatcagggccgtggaaatggaggttttcatttttccgtgctgcctggctcccagatactgggaggtcaaaaccgacgcgccgtttcctccccctatggctatcataataaacacattggtcagggcataggaagcacctacagccgccaacgcgtcctcgcccacaaaattgcccacaatcatggagtccgccatgttgtaaaactgctggaacaggtttcccagaatcatgggaagggcaaacaggagaaggcggcgccccggactcccttccgtcaagtcaatccgcttttttatctgctttccctgttcacggctttttgctgcactctgattcatgttcttccctcaatcattcatttgtatggatacacttcttaaattcctcaatcagctccccgaagaaaccaagggcttcatccaccggccgggtggtggacatatccacaccgcagagcttcagaagatcgatgggcttcatggagcagcctccgcttaagaacttcttatacccttccagcgcgcctggttccccgctcataatgcggctgctgatggccacggctgctgagaatcccgtggcatactgatatacataaaaaggtgtatagaaatggggaatcctctcccactcataatcaatctggcggtccactgtcatggccggcccgaaatagtccgcattcagctggcggtagatactgcacagactctcagccgtcaggctctcccctctggccgcctttttatgggccatatcctcaaactccgcaaacatggtctgacggaacagggttcccctaaagctctccaggaaatgattcagcagatatgccttttcctccctgctgcctgccttcttaaggagatggcgtatcagaagcgcctcgttgcaggtggatgccacctctgccacaaatatcttatacccggcataggtaaacggctggttccggtcggaataccaggtatggatggaatgtcccatctcatgggccagggtaaacacatcgttaagggtgccatggaaattcagcagcacatagggatggctgccgtaggtcccccaggaataagcgccgctgcgcttgccttcattttcatagacatcaatccaccggctgtcaaatccctgctttaacaaggacagatattcctctcccagcggagccaggccctccagcacaatggactttgcctcctcataggtgtaacggcggtcagccgctgccaccatgggtacataaaggtcatacatgtgaagctcatccactcccagcacatccttccgtacccgggtgtattcatgaagcttcacgatattttcccgcactgccttcaccagattgtcgtagaccagctcaggaacctcgttgtcagccaggtaatactcccggctggaggcatacttctttgcctttgcgtagaatacggcctgcttcacattggaggaaaatgcagctgccagagtattggaaaactgttcatacacactgtataacccctcgaatgcatccttgcgtatcctgcggtcctggttctccatcagggaaatgtaattgccgtgggtaatctggattccctccccactctcccccgtgataacggggaacttcacatccgcattgttgaacatggtaaaaatctggctggcgccctgggtggcgtcataggactgggccagaagctcttccatctcgccggacagggtgtgatcccgcctggcaagaatgatttccagcgcccgtttaaaatggcctatgccgttatccgccgccatatactgttccagaagctcccggtccatggacagaatttccggcaccaggaaggagctgttctcagctgcccggtaggacagcgtctgggccctggaaaacatatcctggtatctctgcacagtggtatcctcgtcggaacgcatcctggcatagacatacagacgctctatcttctgggaaagcttgtcgtcgaacaagaggcaggcatacagggtatccgcggacccggccagtcttcccttgtaggaagcatattcgcttatttccccggaagcctctttaaacatctgttcccactggctgtcctccgccaccatatcctccagtttccaggtatacttactatctgcttcgcttcgttttttcatgcagaacacactccttccaaatacaatattaaatgggcgctcaattaaatatacattattttaaattacacgctaaattaaattcgctgccagaggaaccacaataaccgtcatcagccctgccaccgcaatggagagactgctcatggcgccctcgatttctcccatctccagggccttggccgtccccaccgcatgggcgctggttcccatggccaggcccttggcaacgggatggcggacctttaaaagctttaacacggtctccccggccatattgcctaacacccctgtaagtatgatgctcatgaccgtcagtgttacgatgcctcctgcttcctcgctgatacccattccgatggccgtggtaatggacttgggaagcagtgtcacgtagtggacatgggccatacccagcaccttgcacatgaggaaaatactcaccgcactggtgaccacccccgatgtgatgcccaccgccacggcgtcagcatgtttcttcagcagatgcagctgcttatacaatgggattgccagacagaccgtggccggcgtaaggagccagctgagataggatgcacctttattatatgtttcataatccattcctactcccagaatgcaggcaataatcagggctgccgacaccagaagaggattcaggatagccagttttgttttattcttaagccagcaggcaaacagataggcgcctatgctgagcacaagaccgaaatattgtgtttgttccagtatcaaccgtatgccttccctcatgtcactgctcctccccgctgtgttttctgcccatgacccactgggccatgcatccggtcactgccatgaccagaagggtggatattcctatgattatcagaaagggcaccagaactgccttcacctctccgatacattccacaatcccaaccgttgccggtataaacatcatggtcatggtatccatgagaaaattacccgtgccctccacgctctccagcttcacggccccgcacatcagggctgccagcatgatgaacaggccgtacacaccggccggcacaggcaggggcaccacatgattcaatatctctcccgccagggttatgcccaggataattcctatctgttttacatatctcatatcttttgtttcctcctgctgcgttagagcgtgttttaagccatgctccgattatgtttgaaattcgcacggcctttattctaccactgcatttttccataatcaaccagaatacagataaatacacaagaaatacaatcttgccattgcaatgaacgccttactgccctacaatataggaaagtccaaaggtaagaatccaggaggccgcgcccgcatgaatataatgcataccaacaccgcacatacaaatctgactcatacaaatatcacccatacaaccacattatcccggaaagaacaggaagatatacgcaggatttcggccctgtgccgcctcacggacggcctgagtctttcctgccctgaggacggggatgaatactggcttctggaggaggacgccactgcggctgccttcctggccgtgtataaaacagaggaaacaatgtgggaatgctatgctttcacacacccggattttagaagaaagggatatttttctgcgctcctggaacaggtctgccagtacagcgaggccctgggcgagccggaactctgccttgtaaccgacaacaagtgcccggcggccacggccgctctccgggaactgggggcagagctttggaatgaagaatatatgatggaatataatacagcagccgattcttctgaggatggaaaatccgcctcccacgcctccctgccgaacagagagccggacggagcggatggcagaaagcaggatatggaactggacatggacatccgtccaattccggaagggctgctcatctgcgccagaaggccgggggaccatccctccccggacaaggatggcataacttcccaggacagggatgacatcaccgcccggaacaaagctcacagcaccgcccggagcaaagttcacagcaccgcccaggataacacctccggtacagacagcacgccggacgcctgcgttacctgccgtctttccctgaacagcaccgccgcatacctgtacagcctggagaccgctccggccctgcgacgccgggggctggccagctgttttctcatacagctcatccgctatctggagcgtgagggtatccggcggatctgcctccaggtatccggctccaatgaacctgccctgcatctctatagaaaaacagggtttcgcataacggaaaccctgtcttactatctctactagagcctgtctgaactatctgatttacagtctctgtcagtccctgcgcaccgtgacgccctgggcttcaattttcttgcgtatctccagcatcttcacgtctgtgccggcaatgacctccgcacactgcttcagttcctcgctgatttctccgttgtcgtcaataaaggacttcttatactttaactgatggtccaggctggcccagaagtccatggcaatggtacgtatctgcacctccacacggataggcttcttgctgtcggagaagaacaccggtatctcgataatcatgtggtagctccggtatccgttgggcttgggattctgaatataatccttcaccgcaatcacctttacatcatcctgccttatcagcatatccgccacttcatagatatcatccaggaaggaacagataatcctgattccggccacatcatccagatttttctccatggactccaatgatatctcgaatcctctgcgctgcagcttttccactatgctcttgggcttcttcacacgggactttatcatctcgatgggattgcgctggttctttacggacagctcgtcgttcaacacttccagctttgtcttgacctccctgattgcacaggtatacctcatcatagcctgctggaactggcgagcctggtcaacccacatctccggcacctggaccatatccggtacattgacgatggactgatgaagctcactgttgggattgatgttaatgttcatcggttcacctcattatctatggtttactgctgccgcagttttttataatgcctcgactgcctttacagcctcatcaaaccacggcatttcaagatattccacccgtcctgcatccaccatctgggcaatggcaggatcaattggtatctgagccaggaccttgatgccgtgctctgccgcgatttcctctacatggccttctccgaatacgctgatgcgtttgccgcagtcgggacattccagataactcatgttttccacaactcccacaatggggatatccatcttctttgccatgttcactgctttggctacaatcattccaaccagttcctgcggtgaggtgacaatgatgatgccgtccacaggcagggactggaatacggtcaggggtacatcgcctgtgcccggcggcatatccacgaacatataatccacatcctgccataaggtctcagaccagaactgtttcacggctcccgcaatcacagggcctctccagataaccggatccgtatccttatccagaagcaggttggcggacatgacttccacgccttccatggacttggccggaagcatcagtttgccgtcaggtgatgtggccacgccctcattgccgattccaaaggccatgggaatggacggacctgtaatgtcagcgtccaggacagctgttttcttgcccttgcggttcatgctcactgccagcatggaggtgactaaggacttgcccacgccccccttgccgctgacaacgccaattactttctttacggagctggccggattcagtgcctccaggaactcacttttatctgccttgcggctgtcgcagtttgcactgcaggagccgcagtcatggttacattcactcatttttttgttctccttccaatatttctaaacctaattttcattataaatccatttcacaagattgtccattgttttctggctgccgtcactctcctgccgtcactctccgctgccatcactttccaccgcggccagcagacgcctgagggcaaatcccggccgcctgaccactgcttcctccaacactgccttattggaatccgagtgttccacttcccgggaaaaccggtgggccgcatccgcaaaatccaaaaaagtaagcctgccgccctggtctgtccacagagcctgggccagctcctcaatcagcagggtggctgttgccgccatcttcatttttccatagggattcccgttgtaaacagccccgcagaaataggtgaacacaaaatacaccatgagctgttccttaagcaccggcagccgttttccaatctcactttccaggaatgccctgcgccgcgtctcatatgcctgcctgcccttcccgtaaagagctgccttcatcccggagacaaaggccggccagtcctttcccagaacctccatttcggaaaacagggaaaaggcctcctccatgacctcatacctggaacaggacgccctgtcccagcctgaaggaagccgtctgcgccccgccgccctgcggtaccgctctataagcccgtccgcctcatagagccgcccttttctgatacgggcctgaaggtcgtgggccagtcccaggcacatggatgtcctgtcttcccaagaccaggtacggtctctgaggatatccagtgccagttccctggcatccatcagcttggtaaagagaaagaagtcaaagtcctcatatgtctcctggcgctcatcctccctggtaagaaaccgcaccggttcctcacagcccaatatgattgttgccgcctctatgcaggaaaggcagagcgtcatttccctgcatccctcaaattcctctatatgtctgggatatgtgcggcaggtacggcacaggtactccggcccggcctcactgtagatgtcgcatagattttcctcatttaaaaacgcgcaccgtccatggtactgcttaaaggaaccttccttccaatgaatggaattatggagcctgctgccaaagggtccgtccatgtccctgtacttcttaagggatgcgctgtcaatcatgatgccccatcccgcgcagcaggtgtccggacagccggacgcagtacatttaaaatgattgtaatagtggggaaatgtgtatatcatttgtacctccttataaatgctgcagccttcccccgcagggcagcgcttcatagatggtgcatcccatctgttcttcaaaataatcctttatttccagcacccttttccaccggagaatggtgctgggatgaaccccgtaccggatggtcacgtccacgaacctggtttccagaggacagaatcccgtaggcagggccaggctgtcgcagagctgtaccagacggtcataatcgtcatagactgccccggaaatgaattccttcataaattcataatcctggggcgtcacgtcaaactcaccaatggacgtgcttatatcctgtatcatgaacgcatggctcatacagattctggcagcctcctcccatccgtgttccatgcatctgcggtatccgtctaacagatggcgctccgatgtccggcccgcatatctgcctgtatcgtgaaggaggcccagcacataggcccggtcccggtccatgtggctgcacctggaagctatgctctcacaggcagctgccacgtacagggaatgctccttccagggtcccggatttaaatccgctgcccacttaagctctttatttgccctctctctgtccggtatcattgtgtccctcctgctttcattcttccggtttcccgccttcccaggcagaaaccccctgttgttttaacggaactccgtttattgtactaccaaatcatacagatatctaccttgtatttaagatttaacatgggaatcccttacaacatgccgcggcatttctgagacagcaatgtcccgccgcagcaaatgcttggctgcggcgggacattgtatccatctgttattataatctggttccggttcttaaaaacggtccgggcgctcctattttgccaatgacaatgcctccagcacgtcctccggacggatgggaagcttgtaaaactgcctgcccactgcattggacactgcgttggctatggccggcgccaccggaacaacggcgcactctccgatggacttggctccgtaaggacctgtctcctcctcggagtccaggaaatccacggaaagcttcggcatttccttcacgttaaggatgtggtatttcttgaaactgctggtctggttcctgcctgtgctgtccagcttcatttcctcgcagagggcatagcccagacccatggaaataccgccctcaagctgtccggtgatgcccattggattcaccacccgtcccacgtcatggactgcggcgtattccagaaccttaatcccgccggtgaccgtgtccacctgcacctttgcaaaatgggctccgctgctcatggggcctgcctctgagtggaacatataggagcagcttaaatcctcctgatgcttttccctggcatgaaccgcaatctccttcatgctgacaaacttcctgtgaatatccacgcaccacactgcatcgtcgtggaaatccaggttatccgtggtggtatccagaagctctgccgccagcacagctatcttgtcacgcatgatttgggctgttttcactgccgcgtggccgctggtgtaggtgcctctggacgcgtaggctcccagatccgacatggccgcgtccgtgtccgtctttatgtaggcgatatggtccagcgggatgcccagcacctcggaaatcagcatgcactgggtggtcacggatccatttcccatatccgaggttccggtggtgaacacgatggtcccgtcctcgttcatcttgatggtgatgcccgtgatatccggcatgaaggggaacatggatgttccgtgggaaccgcaggccatgcccactcctatgaggtagcggcccttctccttcctggatgcctccatctgctttttggcctcgtaccagtcgatgagctcccgtccgcggaccacgcagtccttcaggcggaagttgccaaaggattccccgtcattgcaggccgcctcaaagggatccgccagattcttaaggaacacgtcagacgggtccaggcgcaggctctgggcaatctcgttcatcatggacgatacagggaaaaactgctgcggggaaccaaatcccctcatggcggaagccaccggcgtattggtatataccggtattccccggcatctcatattgcgggtctttaagagcttatagaacttgccccctgccgcccagcacacggacatggtggcgctggtgtgggcgcctgcgtttaagatcatggtctcatcggctgccgtgatggttccgtcctttttcactgccatggtcaaatccaccttggcagcatggcgggtgcgggtacagcagaattcctcggtcctgttgtagaccattttcacgggacggccggtctttatggctaagagggctgtcaccggctctgtgaccaggtcaatcttaccgccgaagccgccgcccatcaccggactgataacgcgtatcttgctcatgggcagctcgaaaatacgctgcagattgattctctggccaaaggcatcctgggtaggcgtccacacggtcagcttgccgtccgcatcatactccgcaatggaaacatgtgtctcaagggaacagtggttcacggccggcatctcgtatctgtgccggaaaacatggtccgcatcccttatggcgccgtccacgtcaccgccggagttattggattccatgatgatattgccgccctgatgaatggggtaggcgtcctccttcatggcttcctccggatccagatagaagggaagctcctcatattccacagagataagggaaagggcttttcttgcaatctcctctgtgtcggccgccacagccgccaccttatcccccacaaagcggacggtctggtcaaacaccagctcggagggattgatgtccttatcctcaccgtttccattgtaacggttctttggagaatccttgtagcagacaacggcatggaccccctccagagcctgggcctgggtggtgtcaatggacttaatcctggcatggggaacgggtgaaaataaaatcttggcatacagcattccgggcagcttcatatcggccacataccgcatctgccctgtcaccttcatggcggcatccctgaccggcacgctttttcctatcattccattcttgggtatctcacatgacatagctatcttccctcctttctcatgacctgggccgcacgcttaacagcctccagtattttcacgtaaccggtacaccggcacaggtttcccttcatggcttccttgatttcctcctccgttggatccggattcttatccagaagagccttggcagccatgaccatgcccggagtgcagaaaccgcactgcacggcgccgcagtcaatgaatgcctgctggatggggtgaaggcttacatggccgggtgatattccttcaatggtttcaatggccttccctcccatatccattgccctcacggaacaggagttgacagcctcgccgtcaatgatgaccttgcaggagccgcagtcacctgtactgcatccgcatttggtgcctgtcaggtccatgacctcccgcagggtgtaaagcagggtccagtttttttccactgctatattataagttcttccgttaacgtttaatgctactaattccatcttgacctccctatcagttatattctgcctctatgcctcttcctttttttcgccgggaagaatgatattcagtaccagggcagtgatggccgtaccggaaataccggtaaacagcgtaactaccgtggagggaaggaacgcaagggttcctgcggcctgggcaaagttgccgccgattcccactgccgccgccagggcgatgatggtaaagtttctcttgttgttctcgtcaaagccaataaccttgataccgctggcaatgatgtttccaaaggtaaccagcaggatgccgcctaaaaccggattgggaatcagggccagcacctgggagaacttggggaatatggccatgaggccgaagataacgcctgcaatggctgttacaaacctggaagccacgccggacataacctccacgccggagttctgggccgccacacacatgggaagggcgttaaacagggtggagaacacgccgcccagggcgtcgccgcgcacagatgcctttaaggtttccttggtgggaaggccctcgtccgtggcagtgacaacaccggtggtgttgccggagttctccatgatggttgcaatatggatgataaatacggtgattacggcgcccagatttacggtcattccaaagttaagaggtctggggacagctacccaggccgcgcttcccacctgggagaaatctaccattcctgttacggaacagaacacataacctgccaccatggcgatgagtactgccaatgactgcacaattccctttgcaaaatggtcgataatgacgcagattgccgcgatggcaatgccgattaaaaacatcttcatggcgtccggtcccgtggggttgtaatccaccatgtcgttccatgcattgagaatcagacacattcccactgccagaaccacagaaccggttactgcgggcgtaaagtatttgtacagtttgtcaatcacaatggggcccagcaggaacaggagcagcgtgccaagacaggcagcaccaaaggctcccggaattccgatgttgggatcattggcaaacagcaccattggcgtgatgagggtccagcttcccgcagataccaggggcagcctggcgccaatctgaaacttgccgatgcggattcccagagactgaatcagcgtggtgatacagcaggcaaacaatccgcactgtatcagaaacgccgtgtcggccgagttcattccggcaccgcttgccagcatgatggagcctgtcatagaacctgtaaagatagtaaacacgtattgaagggcccaaggtacagccttaccggcgggaaccttgtcgtcaaatccatattgcattttcataaaaatatcccctttataagtttttatacatcagttgtcaagttacgaaatactagaattttgcctctttcatgatcctggacattttagccattttccttcccaggatttcacagtttctgaatccgtccgggtcctctatctccgtggatccgtccccgggattccacagcatggggccggaatacatccctgagccgcctgtacagaccgtcattccctgtgtcaggaaaaagttggtgatggaattcatggtggcctcctggccgccgtttctggtgccgcccaccgtgattcccgcccctaccttgtgggcgaagaaatcaggatcctccactcccttaagccatgcggagcggaaccggtcaaagaaggtgcacagctgggccgttatgttcatctcgtagaccggtgacgcgataatcacgccgtcagcctcgtaaaatttgtcgtacagctccgtcatatcgtccttgaacacggtacagcggtcggatttatcccgcaggcacttgttgcagtggatgcagaaattcattttcttggcgcggagctccaccagctccacctccacgccttcctctgcattcttagccgcttcaagggctgtctccagcgccttgtagcaggacttgcggcgcgggctgccgcagattcccagtatctttaccatattctcttcccctttcccggtgcagcgcactgcaccgtataaaatctatttatctcccaaggctgccaggacccggtcgggccttgccggaagttcattgatttccccgcggaccgcattgcagatggcattcaccacagcgggagccgcaggaaccacaggacactcgcccagggcctttgccccgtaaggaccgtccggttctccctgtggggtttccacgaaatccatatatagctttggcatctgggaggcccggagcaccttgtattttttcagtgtctgtacaagaggttttccgtccccgtcatatgccatatcctcgcaaagaccgtaacccagtcccatctgtatggcgcctgccagctgtcccttaagcatcaggggattgatggcgcggccgatatcgtggaccgccgcatattccaggggccttacctctccggtcagggtgtttacttccaccttggcgatatgtaccccgtaggaggtggctccccgttttgcctcgtaagtctcggccaccatcagctccctcatgctcacggactggcagtggaccatcacgtcgtgaagggaggcgtttttctcctcattcttcctgctccaggccctgtcgtggtgaagctcgatatcatccggctctgtctctaacagcttggctgcctcaacctgcaattcccgtttcatggcctcagctgtcttcttggctgcgcttcctgccacgaacacgccccggctggaataatccccaatgtgccagtggaccacatccgtgtccgctgccaggcagtcaatccggtccatgctgattcccagcacctcggatacaatctgcatctgcatccccagcgtatcggtacccatatcatgagagccggtgtaatagatgcaggatccgtcctcattcatcttaagcatgggggttgacacatcccggtgggcgcctacacagttgttgccgtggactcccagagccaggcccaccccaatccgtatatcctgatttcttgtagcctcctgctccttcaggcaggcttcatagtcaatgagctccagcgccctctttaagcagtcctttggcctggaattgccgtggggtttgtggaaaatagggtcgcagctgtccgggtccaccatgttcttcatctgcagagccgccatatccatgtgaaggaaatccgcaatcttctgcatctgtctctgccatccgaaatagacctggggcgagccgtaccctctcatggctcctgctatctcggtgttggtgtacacgggctggcactggaaacgcatgtggtcaattttatatgccttaaagaccttgtgggacatggcgccgcttacattcagggcgctggaagcataggctcccgtgttggtgtagactttaaaatccactgcctttaaggttccgtctttcatgaaccctgttttaacatagtttacggaagcgtggcgcacacgggtggacagaatgctttcctttctgttgtactccaccttcacaggctttcccgtcatctgggagagcactgctgccacaggctccaccgtcacctccagcttgcctccgaaggccccgccgatggccggcgccaccatccgtatcctgttataggacaggccgaagatacgcgacatgataacacggaaggcaaaggtgttctggcatggactgtatacggtcagctttccgttgggagcaaagtcagctatggcaacatggggctcgatggccgcatgatgaatggcctgggtggtgtaacggtcctcaaatacataatcgcactcctgaaaggcctcatccacattgcctgcctctgccctggaggtccccacaatatttcctccctcatgaatgggccaggcctccggctttatggcttcctccacatcggtaatcaccgggagggcttcgtactccaccttaatcaggtttactgcctttttcgctatgtccggggactccgccgccacggcagccaccctgtctcccacaaagcgcacggtgtcgtcaaagatgcgttccgtgtccggaagcttgtgctcaataaaacggaccgcgctgttgtaccgcacctggggcgtgttcttgtaggtggcaaccgcctttactccgggcagcgcctcagccgcggaggtgtcgatgctctttattctggcatggggaaccgtgcttaagagtacctttgcgtagagcattcccggcagttccatatcacctacatatatcttctgtcccgtcacctttaaggcagcgtcgcctatgggtctcggttttccgattacagtgtattcattgtccattccggtttcctcccatccgactggcagccagtaatatggcctttactatattgtcatacccggtacagcggcacagattcgggtcaatggcctttctgacctcctcctcccttgggtccgggttctggtccagaagggctttggctgacataatcatgccgggaatgcagaaaccgcactgtacggctccggcatccacaaaggcctgctggattgggtggagatggatgccgtctgaaaggccctcaatggtctcaatggccttaccttccagattgacagcctttaccaggcaggagcgggtggctacgccgtctatgatgaccatgcaggctccgcagtcccctgtctcacagccgcattttgttcctgtgagcctgagtccgtccctcagcgtctttaacagcgtccagttctttcccactgccagttcccggcagaccccgttgatattcaggctaattgtctccatattgtatttcctttcagaacatcatttaacttgttgcttgaagaaccggtatgcattgtcaaagaaaatcttctgcacggccgcttccccgatgccgtgttccaccagatagtccgcaaaccgtcccaccccgtaaggtgtgttcagatcggggtcgcaggtaatctcgccgtccatatccccgccccaggctatcacgtcctctccgcctaactccagcatgtggtagatgtggcgcagcagatagtccttgctgccattgtcatcgtcgtctatgaaccgtgagaacaggttcaggccgcacaggcctcccctgcgcacaatttccttaaactgcgcgtccgtaagattcctgggatggctgcagcaggccctgacattggaatgggatgccacaaagggacgctctgctatgtttaacaggtcctcaaaccctgcatcgttgagatgggagcagtccacaatcatgcctacctgctccatcctctttactgcttcctttccaaaggcagtgagcccggtatcgttgtttggccctgaacccagctcattggccccgttccacaccagtcccagcatcttgaaattcaggtcagcaaagcggtttatgttgtccagatccccgtttaacgcggctccgctttcaatggagcggataaaggcccattttccctcatccagtatccggtccaggtccgtgattttctccaccagttcagcctggcctcctgtccttctcacctggtcgtccatgtactggtggtaatccagtacgaactgcactgcctcctgcccgcggatatcatcaggcacgaaaacagccatgacctggacagccttctggaatttctccctgtccctgagggagaactgggtggtgcagttaagataatcttctccccgtttttttaattcttctatggtgtcgcagtgtaaatcaaacagcctcatagtatgtattcctttctctctggatttgcctgtgcgggttatgtgtcagagcccggccatcagctccagaatgccagggccttctcaaactggtcctggggggtggtcacatagcccacaggaaccttgcatccggtggcctcatacattttctttgccagttcctccccgaatgccccgcagacctcaatggctccaaatccttcctctcccagacgtttggccagcgccacagcctcttcgggattcctcaccgtgaggatgtgtgtctcaacctgctccaggtccagacgcgccatgtccttttccgggtcatagcccgcgttcatgattaccatagcccacttcttcattgccataatcagtttcctcctcgctatgttctctgcgtaaccagttataccccggcaaacagggcaaagcgtgcggggtgaaccgtacacgcttaagccctgtctgccaggggactatccttttagtgatcctatttcaacagcgccttcatgactccgtaataggattccatgaccttgtttaactggtctatctcaatgtattcgttgatggtgtgggccagtgtctctaaggacgggcctacgcctacggaacggattcctgcctcgcctgcatagtggctggcattggtgcagaaatcatagttggtgatggttgggttcaggccgatttccttcatttccttataaatgttctgtacccagtcctcgttcttgtcgaagagccatcccgggaagaaacgctctgcctcgatggtctcgccggtccagcacttctcctggcctactgcgtaggaaacctttgcctttaactgcggatcttccttcatcatgccgtccagaagctcctgtaagggagccagtacgctctcctttgtctcgccggtgagcagacgtctgtcataggttgcgcggcagtaatccggcacaacagaggcgcctgggtatggggaggatttcacatccaccagctccaggatgccgtcgcccagcacatcgtggtgaggaggtgtcagcttgttgatttcctcgattaccttgcacatcttatagactgcgtttacacccttgtgggggctggcggaatgggcgggaacaccgaaggtttccaccacgatctcagcacggcctctctggccaatcttcatgttcagctgggatgcctcgccgataataacataatccggcttcacataagcgctgatttcccttgcagccacgccctcgaagcactcctcatggacaacgcccgcaacgtagatatcgccggggaagtcgtagtctgcatcctctgcatagtaaagtgctgctgccagcatggcggacagggcacccttcatatcggaggttccgcggccgtacatcctgccgtccacaatctcagcgccaaatgggtcgtgatcccattttgtcttatccggtacaggtaccgtatccatatggccgtcaaagaggatcttcggacctggtttggatccctttatgtggcagatacagttgccgtatctgtccacgtggatatcggtaaatttgtgctcgtcacagaatttcttcatgacgtccaccaccaggttctcctggccgctgtagctgggagcctgaatcattttagttgtgagggccagaagttcctctgcccttttctcatttaacattgacatttctttttcttcctttctattatatactgctacttaaccaactcgtagaagtcctttgacttctgtgccagttccagatccttttctgtctgaggagccagctctgcggtgagggcacctgtgggacatacgtccagacagagaccgcagcacctgcatttatccatatccactgtcatttccgggaaggtgagcttcctggcgtcatagcagcagacggtctcgcactttttgcagctcacacatttctttgtggtgccgtcttccttaaatggtgtgaaatggaacttcagaccggaaatatgctcttcactggggaagtttggatgggctgccctgtttacctcctggatggagctgtatcccagctctgccaggcgctttgacaggtcatagcacatcttctccacatactccacgcccttaaggataccggccgtgcagacgcctacacccatggctcccgccatcatgtactcgatggcgtcatccgccttcatgactccgccggacgcgtacaggttcataagctggggattctctttggcaatctggtaattgtagcgcatggcgatgggcctcatggcagcgcctgtcatccagccgaagccgtccccgctcatcatctcaggagcagccttctcaatgtcaatcttcagtgtgggtccgatggaatcaatggcgcagattccgttggcgccgtgctccaggcatctcctggcggttgccgcagtgtcgggccagttgccggacagcttgcagataacgggaatatccacatgcgccttggtgtagtccagcatgggaagcagtgtgtcctctgtataggataccagctcaatcatatgggctccggcacgttccacatcctttacaatggcctgggcctcctttaaggtatggcccacggaaccaatgacaacggctccggctgcaacggttttcggtatctcgttctcataccagttcaggcggtcggaatcagcccacttctcgcagttgatcagggaatcctggttcacggtgcccatgtggtgtaccgggttgatggctgctcccaggcggatggtctttgtcaccaccgcgccggcgccggcctcatggcccttaatcattccctccgccccgtagcataagggtcctgatgagagaatataggggctctgcagatggcatccgcagaagtcaatggagatatccgctccggttaattttgatttatctaacatattttacctccagcatttgtttacttcagtccgccttcccatacaatggtcttatagcggtccggatccgtgtctccctcggtggagaacataagtaccttggaatcctgattcagtccaagctccagacgcaactcgcggtaggattcatccttcatgatggtggccagggcgccgaatgtggctgcgccggactcacctgaaaccacctgggggtctcccttaaagggagctgccagcatgcgcatgcctcttctggccacatcgtcgttcactgccaggaaggcggtcacatggttctttaagatatcccaggaagtgatattgggttcaccgcagcacaggcctgccatgatggtgggcatttcgccgtccacaatgcgtatctccccgtctgccgcctctgcgcccctgtaaaggcaggctgcaggctctgcttccaccactaccataaccggaggattcttcttatacttgttggcaaagtatcccaccacgcctcctgccaggcttcccacgcctgcctggacaaacacatgggtgggacgctcctcaaactgctccactgcctcgtcagccatggtggaatagccctgcataatccaggacggaatctcctcatagccttcccatgcagtatcctggatgaccacgccgcgctccgcgtgtttggcctcctcggccaccatcctgacacagtcgtcgtagtttaccttctcgatggtgcactcagcgccttcatcctcgatgtggcggcgcctgttctcagtggagcccacaggcatacggataacgcatttctggccaagacggttggcggcccaggcaacgcccctgccgtggtttccgtctgttgcagagaaaaaggtggcctggccgaactcgtcgcgaagctccttggaagtgagcacgctgtaaggcatctggctgatgtcgcgttttgtctcttttgcaatgtatctggcgatggcataggaaccgcctaatactttgaatgcatttaatccaaaccggtagctctcatcctttacacaggcctttgccaggcccagatattccgccatattcttaaggtctgccagaggtgttacctggtactggggaatgctttcatggaaagcccttgccttctttacctccaccacagacatgatgggaagatttttgtcttctgtcttaggcatcttgtttaaagcccatttgatttcacagctcatgttccaatatctccttgatttaatattacaggcaaacgtcagacgcgtcctgccccttattaccggttacagcttctccatatggagcttcttaagctcctctgccgcctggtagatggcgtcggtcagctgctcataccctgtacagcggcacaggtttccggatatggcacggcggatttcctcccgtgtggcatccggattctcgtctaagagagccttggcgctcatgatgaatcccggtgtacagaatccgcactggagcgcatggttctcaagaactgcctcctgcaccggatccagcttcccgtcgcagcccacgccctcgatggtgaccacgttccggccatccaccgccggagccggcaccagacaggccgtaactgccttgccgtccataatcacggtacaggcgccgcactcaccgattccgcagccttccttggtaccggtcaggcgcaggtcgtctctcagcatatccaaaagcctctggtggggttttacctccacctggcagggctttccgtttaatgtaaaacttattttcatcttctccactgctatacctccattcctgctgcctggcacagggcccgaagtacgatttcctggaccgcaggctccttatactgggtggaccagcggacgccggtgcgctctatcatgacctctgacacggcttttcctgctttggcaaacagctcctcagacggcttctgccctatcaggacctgctcggccttctccactctgtcaggcagtataaagatacatcccggagcgattctggcttctgtgatggttccctcagagtccatggtaagggccgcagcgcagttaagcctggatatggccagagcctttcttctgcccagcttggaaaatcccattctggttccctccggcagcttctttaccacgaattcgcggatgaattctcccggttcaagcttaaggcttccctttccctcataaaaatccttaagcaggcatacccgctcgccgtcctggccgtacaccttgataagggcgtccgccgcaatcagggccggaagggggtcggaggcaggaaatgcattgccgatgcttccgcccagggtcccgcggtttcgtatctgcggggaacccacggtggcgctggcccatcccaggaaggggatgtgctttgcaatgatttccgactgttccaaatccgtgtgggtggacagcgggccgatgtatacatactcctcgtcctcgctgatatagcgcagctccttgtctaaataggtgatatcaagcagacactggaggtccttccatcgtttatccttttcgtgaatctggaccatgatgtccgttcccccggcgacgatacgggccttgccgccgtattccttaagcactttcactacgtcgtccagggaagcggccctgtgatacttatactgaatcatttgccgaatctcccttctactgtaatttatgtcccagcaatactgtctctaagtctgcaggattttcatagacccggcggccggtggcgttaaagatggcattggcaatggctgcccctacgccctcggtggctggttccccgatggatttggctccataggttcctgccggatcctggttttcatatatattgatgttcattttcggagcgtccatggaggtgggaagaatgtagctgtcaaaattctttgtcttctgcccccgctttccggttaccacgtcctctgtcaccgcaaagccctggcccatgacaatgcctccgtaaatctgtccctttacaagagccggattgatggcggtacccacgtcgtggctggctgttacctccagcacatccacgtagccggtcttcatatccacttccacttcagccacgatgcagccgtaagcaaaggtggggaatgcttttccctgtcctgtttcgtggtcctgaatcagatcctggggcttaaaccactcaaaggcagccatctgtttgccggtccagagacaggcgttgcagacgccggagaaggagaccttcacatccggatatttcttcaaataaaactggctgtctaaaagctccacctgatctgctgtcagcttgctgtaatccagggttcccttcttaaggccgtatgccttctcgatttcctccagcggaaggctgtgaagctccagggcattctggatcatgactcccttcagcttctctcccgtctttctgacggactgtgctcccatgaccgttcctctggaagccactgtcatgccgcagtccgggatggaatgggtgtcggtgccgaagaagcggattgcctcatagctcacacccagggcttctgccgcaatctgggcataggctgtctttaatccctggccgttctctgccagaccggaattaatcatcacggaaccgtcctcgttgcagatcatcatacatcctgaagcgtccggagattcagctcccaggccggaacccctgtggcaaacggccaggccaattcctctgcgcttacggcttccctcaggctggtttaagtaggccgcgtgcttctccttgtaaccggtctgctctgcggtggcgtccatgatatcctggatcacgcagtgttccacgggtacgccggtggctgtcagagctccgtcgtggagaaggttcttgcggcggaattccagttcatccataccgcaggccatggccagctcctcgatgaactgctcctgcgcccaaatcagctgaggggatgagtagcctctcatggcgccggagtgtacattgtttgtgaacacaccgtatgtatccgtcttgatattatcaatctcataagggcctgctgaatggacatttgccctccagttcatgaactgggtctggttgttgtaggcaccgcagttatccacctgctcgccctgccaggccacgatccgtccgtcctttgtgattccggccttgtagcggaggcggaagggatggcgcttagcagattccaggaaggagtcctccctgttgaacacgaacttaaccggctttttcgtcaggctgcacaggtaggcgcatcttcctgccaccagtcctgctccttcttccttgcctccgaaggtgccgcccagggtctcctggaccatgcggacctggttcatgggcactcccagcacatccgccacataccttcttgtaaagaagggattctgggaagcggaatgtacggtcatggcgccgtcattgggattcaggtaacagatacatgcctccggctcaatataggagtgctcaatgtactgggtcctgtattccctctccagaacaatatccgccttttcaaatgctgtgtccgggtctcctttgcggatatggaacacggaatccttaaaaatattgtcgggatatttctcatggaccgcaaaggcgccctcacttaaggcttcctcgatggtatacacgcccggaagctcctcatactccgcatgaatcgcctccagagcctcatccaccagctcctttgactgggctgcgaccatggctacacagtcgccggagtaacggatggtatccgtcagatacatgtatcctgcccagcttctggtgcggggcatgtcaaaacaggtaacaacagcctccacgcccggaatcgcttttgctttcgcggcatcaatggacactaccctggcactggaataggggcttcttaaaacgccagcgtaaagcattccttccatatatatgtccgctgcgtagcgcgcccttcccgttaccttatccaccccgtcaatacggggtacgcagtggtttaccacagaaaaatgtttttcgcctacttttgttaacgacattctgaatctcctttccagaacctctctgtcttttcctccatctctctgcgcacagcctctttgtcaagagtcaccagctttccgtccctcttaagccatgcgcctcccaccatcacgtttatcacattctgggggttggtaaaaagtactaattggtcatatacgttatattcattaatgggagtgggtcttgccacatccacggtaatcaggtcggccagcatgccctcctttatgactcccgcctctatgcccactgcctttgcgccgagctccgttgccatacggtacaccttccttgcaggcatggcctggggatccttatggtagcccttgtgaatcaggaacgctccgcgcattacttcaaagaaattgttcacatagccgtccgtgcccaggccaacggtcatgccggcctccagcattttctctatgggagctattcctccgcccacctcgcagttggacagcggcatggaaatggccttcacgtctttttctgccaggatagctatttccttatcagtgacctgtaccagctgggaagccaggacgttttcgtccaggcatcccatgccgtcatatgcttccaccggcgtggtttttaaatgttccctggcccatgccggttcaaggtcgctttcactcatatgcatgtgaagcaggcatccggcttcgtctgccatgcgctttgcttcacgtatgaaatcctcgccgcaggtaaacagggtgtggatgctcatgacacctttcacaagaccgttttcctcattacaggcctttgcaaagtcgaagttttccttcagacccagccggccgttttccccgctctttctctcgcaggcctcaaaggacaggaagccccgcagaccggctttctccacttcctctttttctaccgcaagagcgccgggaatagaattaggtccttccaggatatccacaaaggatgtaaccccggagtcaatcatctccacgcaggcccacctggtggtgatacgcgccaggtcatggtccactctgtcctccacgtagggccaccagaaatcctccagataatcggagaaatccgttaccattgcctctgccgtgatgccgtgggaaaggacgccgtacatatggttgtgtccattgacaaagcccggaagaagcatctgtcccggaaggcagactgtctgcacctcctcattgcttccgctgcccagggtatcccatggacccacacaggcaatccgtccttcttctatccggacgccccagccctttttcaggccctccggcgtcaatacatagtctggttttataatggccgctgccagatttccattttttatcattctctactgcctctcatattttctataagtatcattccacttatgtccttctaagcggttggtgatattgcctctcacgcagagttcctccgctgccttctgggctgcccgaagttctgtcttttcatcctctactgtcaggataacacccttttccatgactgccctgccgtccacatacacgtctgtaatgttctttaatgacgcggagtacaccagggtagagcatgggttgtgaagaggtactgccttgacgcactcatacgggtcaaagattaccatatccgccttcttgcctgcttctatggaaccaatctccttttccattccaatggcccttgcgccgtctatagtggccatctccaccaccttctcagccgacatggacagcggatccctggtagcgcacttctgcagcagggccgtgttcttcatcagctctatcatgtcgttggcgttgttggaagcagctccgtccacgcccagagaacaggtgacgcctgcctttaaaagctttggaataggtgccacacctgatgacaggtacatgttggaacatacattgtgggagatcttaaggtcatattttctggccttctcgatatcctcatccgtcagatgcacacagtgcaccatcagtacgttgggtccgcagattcccatgtcaatcatggcgtcgatatcccacagaccgtggatgcccttggctgcctccctgtcaaactctgtctcagagatatgtatggtaatgcctgatttgtactcgttggtcaccttccagagcatctgaagcgtctccctggtgttggaccacatggctgccggcgccacccagattttaatgcggccgttgtcgcagttgtggtagcgctcaaagatatccctgacgcccttctcgatgtcgtccttctgctgtgtgatgcccggatgcacgccgtactggattccggtgtccatgcagcccctgccgaagatgccgcggattcccagctctctcatggcctttataacgccgtcgtccagcccttcccttggatggggatacatgtaatccacgttggtggtgataccgctgtggatgccctccatcaggcccagcatggcgccgtggtagcagtcatcgggagtcaggttggtggctgcagggaaggtcatggtttccagccagtcctttaacaccatatcatctcccagtccccgaagcagggtctggaacaaatggttgtgggtgttcacaaagccggggaacattaccctgccctccaggtccgtcacgcgttcacaatccgtatacttggcctccattgcctcggtaggtcccacttccacaatccggtcgtccttaacggctaccgcaccgtgaaagaatatctccctgtcaggatttaccgttacaatgattccgtttttaaataaatggctgatcatagtcaaaactccttttctcattgattcacacaaatgctgctctcacacgtatggttctcgcacgtatggctctcacacgtacggctcttacaatcaggccctggctgttcccagctcctggtccttggcagatacagcgtcatcttccgtctggctgatttcccttatgtactctgcttccacttccttgtccgtctggtcctttggaagtatcaggttcagtataatggcaaatccggccaccaggatgatggatgactccccgaagaacatctgtacatattcacccatgcctgacagcgtatcctttgccagagagatgcccagtcccagtgcaagggcaggtccgcatataagcattgccctgttggtaaatctggctcttgccaccaggctcatgcctgacatacatatcatggagaataccacgatggtggctccgccgataacgcagcttgggatggtggaaagcacgctggccagctttggacagaacgcggctgccgtcagtgtgatggcgccccagcccataacccagcggttacaaacctttgtcaaagcaacgataccggagcactggctgtaggttcctgttgcaaaacagttgaagaaggaggaaaagatacatgcaatgccgttggcgatgataccgccccgcagctcctcattcttcggctgtctgttaagaccgcctgtggccgaaaccgtaaagtctcctgacatctccactgcattaatgaagaacagcaggataaataccaaaacaaagttcaggtggaactccagttttccgaaagccattggccttggaacagcaaaccatgccgcttcgctgatgggcgaaaaattaatgtatccgaagatggctgctatcacatatcccacaatcatgccgcccagcactgctgccgcgctgaccatgcccttgccgtagccgttcaaaatcagaatggccagaataacaatcagaccgatgacaaaattgtggagctgtcccatggacgggtcaccctgtccgcctgccagattataggcagctatggggaaacaggagataccgatagaggtgatgatggttcctgtcaccactggcgggaaaaatctcctaatttttggaagggcaaaaccgatagcaatagacacaagaccgcctataagctgcgccccaaataaaacccctaacccataattgacagatacggaaatgcagatgggaagaaatgtgtatgtcagtcccatcatgacaggcagccctgatccgaattgaatattgccgaaccgtatggggaatacctgcagaagtgtggccacgccggctcccaggatggagcactgcagaagcagtgtagcgtgtgaagtgtccatgccgcttgcatttgctaccagaatcatggggactatgtttcccacgaacatggctaaaagctgctggaatcccagcggaaatgcctgtgcgaatggagggcgtccatttaactcataaatggagccagttttaatagttgaagtacttttggatgcattcttattcatgttgttctcctttaactgattaagaatacgaaagggggcttcttcccttcgggtgttcctgacttcgtcgttacccaccctgattcgtaccaggatgtgcctgtggtatggttctttatccgtccagtgtacaggcttgacagatagactaaagccggagaaaagcctatctgaccaatgtgttcctgagtaaatagttgccggccggtacatctgtcttaaatgcgccgtcctctatgattttttgccctctcagaaatacatgctggactttatgtgaaactaccattccctggtatgggttgtagtctacatactgtttctgtgtgccggcatctatgacatgactgctgtccggccggattaccaccaaatcagcgtcgctgcctggctgtatcactcctttccttggatataaaccaaatatttttgctggattttctgctgtcatcctggcgatgtcgctgtatgtaaggccatggctctcagcctgtgaatacataagctccagccggttctccacacccggaagtccgttaggtatgaggcggaagtcccccaggcccaaatccttctggcccttgtagttaaaggaacagtgatccgtggaaaccgtatccacaatccccttcttaagtcccctccacagggcttcctggtccctgctgcttctgagcggcgggctgcagacatatttggccccctcgaaaccgggaagatggtacttttcctctgtcaggaacaggtattgaggacatgtctcgcagtagaccctcactccctcttcctttgcttcctctatctcctcaagcgcctgtctggtgctggtgtggactatgtaaaccggaaccgtgagaagccttgccatgtcaatcatccgggacacggcctcatgttccacctcattgggcctggacatcggatggagggatatatccgccggatgcccggctgccagttcctcccggcgcacatccaggatatcgccgttttcgcagtgtaccatcagaaggacaccgtgtttcttcatcagtgacaggagccggtacatatcacggtcctccactcccaggtcccccttgtaagccgtgtaggccttaaaggaagtgactccctggcgaatcatggagaggatttcctcctctatcccctcgtcataccgggccacggtcatgtggaaggaataatccgtaaatgaccgtccgtccgctttctcatgccaccggtccaggccgctttgaaggctggccccatggtccggctccgagaagtcaatcacggtggtggttccccccgccacagccgccctggtgccggtctcaaaatcatcggaagtcatgatgctgccgcagggcatgtcgaaatgggtgtgggcgtcgattcctcccggcgcaaccagacagccggacacatccatcacctcttccccttcaaggggattcaggccggcgcctgtctgtaggattcgtccctcgtccatgcggatatcctgccgggtacatcctgacccgctgaccacaattccgttttttagcagcatccttttcacctctttatcctgtactttatcccgtattcccggttaaaccagcttcctattccggcttttaccgcaattatcgttaatttttagacaaatataaacaaaaaaaacaagagccgcaacgctttgtcaaaggttgccaaactcttgttagggttaacaaaaatttttctctcctggtggagctttatgattatgtctacattttacatcttaatctcaaaatgtcaatatactaccaaaagattttcgccaaacaaagcattttcatgtattacttacaattttcccactccttctttgtgatattttccgataaattagttattctcgtccgaaaataacgacaattctaattggtatatttttgagacggagagcaaaaacccctgtccggaatagtccgggcaggggttggattacagatataaaactgcacttaatcctttaacagtttgtattaaaatggaaattttttttaattttatacaattttcggaatatgtttgttatttttctatcgagcctgtcttttcttttatgtattcaatgctcaactcatataccttattcttccactcaaccgaggtaaactgatgattggcaccttttattatttccagccgggccttttgcccgtacaggtccagatatggtccaaccgcataaaccggaaccttctcatctaactcgccgtgtataagaagcacctctttgccgtaaccttccgcctgccttacaatatccgtctttctcacctgggagaggaattcactggacatcataagtccgcctatgtcgtagaactcctcgtagtggcccggaacagcatggacacggctgctgatatcatagtagaccacatttcccggagcccacataacagctcccctgggctgaagctgcggtatgatgttggagacaatggcccctcccatgctgtgccctacgggaaacatattgtccctgtcacaccatggctgctcactggcccacagataaatggccgttgcctgctccacctcatccatatatctcatttccgaaaagtccccatcgctttcgccgcatccgtaaaagtcaaatttcacacatgcgatgccattgacagcgcactttctggcaaacaattcatgaagacgcatctggccaatccgatccacgcaaaagccatgataaaaacaaaccacagggaagggacccgttccctcgggaagccttacgtctccccgcagaagtttatgatttacttccaattcaacattaataaacattccttatcctcccattaaccggtaaatgtatatcccagcagcttcggcaggaacattgttatctccgggaatataatcagtaatgccagcagtatatagagaacgattatcatggggaacgtatctttaaaaatctcctcaaaactggtttttgatactctttgggcaacaaagaggtttcctcccatgggaggcgtaatcattccgatacacaggttaatcaccataatgatgccaaaatgaaggggatcatagccaatggctatcgcgataggcgcgaagatcggcccaaacagtacgattgacgatatggtatccagaaacatcccaataatcaggagagcaatattgatcatcagcatgatcatggctctggaacttgttatggacagcatccagtctgtaatcatggtcgggacacggttcatggtcagtatccgcccaaaggtatttgccgcgccaaacagtatcatgatggtagccgatgtgatagtcgcgtcaaacatggcctggcaaaaagccttccagctaagatgatggtatacgaaaacagctacaataattgcatacacaacaccgatgaccgcggattccgtgggagtaaacacaccagagtaaatgcctcccaatataatgacgggcatcaggatagccggtatggcctctttcagaacaaccgctttttccccggcagtctttgccttggtctcattccccttgtagccccgctttttgctggcaaaatagttataaatcatcagagccacacccatgaggacaccgggaataatccctgcgataaacatataggatacggaaaccccaatggtaactccgtacataatcatgggtatggaaggcggtattaccggtccgatggtgcttcctgccgctatcagggctccgctgtaccctttggaataaccctgggccgtcatggcaccaatcatgatcccgcctatggccgcagctgtagcgggaccggaacccgatatggccgcaaagaacatggatgctactatggcagccatccccaatccgcccggcatggtacctgtcagcatttccgccacatccaccagcttttttgcaatgccgcctctctccatcaggcttcctaccagcataaaaaacggaattgccatcagtgaaaatgaatcaatgcttgtgactgtggactgcgccagcatctgtgtcatattgcttcccgcgttaaagacagagaatgtagccacacagctcaatcccagactcaccgcaatggggacagtacccaaaaggcatataaataatactcccagcattgtaccaatcatacctctgccccctcctttcctgtgttcatgaattctccaactctgcgctggataatccgtatactcataccggccattcccaatacaccggccagatacataatccatttgggaacaaagggcagggcggaaagaacctgcccctggttccgtatcaaattcataagctggaatatttcataagacatgtatatcccataaccggcagcaatcacatcccccgccaggtacactgcctcaaaaatcttggggttcttcttaaaagccaatgacaatgcagtcactctcatatgggcattgatttttcctgcccagctgattccggcaaaggatgtccataccagcagcagcctggccaattgctcgccccaggaaagggtaaagttgaatacaaatctggtaacaacgttaagtgcaataattacagtcatcacaagaaacatgcatacaatgatatacttctcaatctggttatagaaaggttcttttttctcagtctgctccatgttgttctccttatatgcaaggccttttacttcatgtactttgcgttgatttcgtcaaccttgtttaccaaatcttcccctattccgggaacatacttgtcataaaccggctttgccgcgtcgcggaaggcctgtctctcctcatccgtaagggtaatgattacatttgtcccattgtttccaattttttcttccagttcagcctcattagaagcagaaagttcgcgctcataaacaatcatctcatccacacattcctgaatcaccttctggtctgctgcggaaaggctgtcccaccaggtcttggaggctaataatgggcttgtatcataaatatggcctgtctttataatatatttctgtacctcgtacaatctgtttccgtcaatattggcaaaggggttctcctgggcatccatggttccattctgaagcgccgtatataattcagagaatgccataggcactgcggacgcacccagcgcattgaaatggtcaatgtgcatctgattttccataaccctgattttcagtcccttcatatcctccggcttgtgaatttccttatttgcagtcaattgtctccagccggtagccatccatgtcatccctttgaagcctgcgggttccagattgctgaatatttcctgtcccacttcgccgtccagcacctcctcagccgcttcattggactggaataaatacggaaggtccaaaagggcagtggaatccgtaaatgccccgagaaatgccacggaagaaattgccatttccagggtacccatctgaagctgctccagaagttccgtattatttcccaatgccgaggcagggaatacgtctaccgtaattcttccgccggttttctcttttaacatttctcctaatttgttggatgcaaggtcaataggaactccctcctggctgacatgggctatcttgatcacgataggatctccctgggtgtaatccgcatccccggcagatgactcagctcctgccgcctctgcctgtttctgtgcctcttctttttttgtttctgaaggctgggcagctgacgaaggggcagcgctgcctcccccacagccgctcaaagcgagcgctgccagcgaaactgcggttgcgattgccagtaacttttttcctgtctttttcattcttaatcctcccacataatgattgtattcatggactgtttctgtacttcctgtatgtattaagtatagcaatgccacaattgcaaaacaatatcagccgggactaataaaaagaggtggttattatatcaactgcacactcctttatcatgtgcaggtaaaaatatgctctttttcgccgtaatctcccccctcttgtatatatttcagcaattttctgtgtatctctcccaatttatctttttatttattgtatcaaaagcacatttttatattatgtaaaacttgatatacttaaaataataacagacaggagggacacatttatgtatcttgaagaactggaccttcaatatctgataaacagcgtccgcagtgtatgcggtaagcccatttttatcctgaatccaaactggtccgtcatatcctgcacacaccagggattcaccgaatatgcgcaggagattgcggccttctgcgcgtctgacaatgactatgggacggctgcctcccggtttggcatcataatagaaccgtgtatcctggaggaaaccctcatatgttacttcatgatacttgacaaaaggtccggttacatgattccctatctgaagacgttaactgaattgcttatttctccccagatatctgatatccaaaatcagacagccagttccagaagcatgttaatcaaccagattgccaacacaggtcagaagagccctgagattgacaccttcatgaaggagtttgaatactcatacgactgccccagatgcgctcttttgtttgagattaaccggcatggaaaagaacactcccattaccgttttgactcctcggaatcctatctcaaacagctgattacctcatcctcattgtattccgaagaggatatatatggcttcctaagttcggacaggtaccttattttcaaagataccagctttgcgtccactatgtctgtccgtgaaatcaatgattacgcggattccatggtcacctccttccgtgattataacggtgaggaactgcactgtaccataggcagtacttatacggatttatacaaactgcgccaaagctatctggaagccctattcctcattgccaactatgattacctcaatgtagcgtcctcacatgcgctcaatatacatgattttatttttgaatacgccgtaagcctgattcccagaagctactggaacaaccgcttccagaacctggcccaggacctgggcagctctcccgcccttatggagacagccctggccctttccagggaaaacctaaacctgtcacaggcagccaaggccctgggactccacagaaatacgcttttgcagcgctttgcaaaaataaagtcccggacaaagcttaacccgctggaaaatgaccatgaccgcatggtactgcgggcgttttccctgtatcagaaccagaaaatcaccttacaggccggtatcgtaatacagccaaactccgtactccaccagggtatgcagaaaatggctgatttggtaaacaaaaactcctgtgggactatcaatataaacatccacaccctctccacctccggcaataacgcgcacctgtttgagatactccgttccggctccatcgaccttgtggtagctgccaccggagtcatgaacaagttcaccaacaaccgctcccgggtgctggaattcccttttttattccagtccagcgccgaagcaaaacacatactgaatacaattatcataaaagatgtagaacactcactggattccatcggtgttaaatgcttaaacatatggaccatgggatggcggtacctgaccagcaaggagcccatccgccttccccaggatatggcagggaaaaaggtgcgtgtcatgtttaccgaatccctggatgaatattaccgtaatatgggggctgtccccatcaagatgaattacggtgacgtaaaagacgccctgcactccggtatcattgactgccaggagaatccctacagcaacacactgggaatgaaattttatgaagaacaggacttcatcacgcggttaaaatactatctgagtacagaggcgctgtatatatccaaaaccgcctgggaaagattaagcccttcccaacaagatatcattgctgcggcggcccgtgagaccacggactggatttttacggaacagcagtatgtgattaaccagcaatgcaaaaatatcctgctgacagaaaaaggcatgcatatcatagaagtctctgccggcgaggcaaaactctggaaatcctattcccagaacctgtatgcctcctttccccatcaggatttactgaaagagatagaaaaggagaaaacagaatacaatgcaaaacacagagctctcccatctttataaatcctttaaaagcatatttccaaccgcccatatcgtgattatcgaccataccggcagtgtaataatggcatgcgaaaaccgctgccttattccccaaacggaacaatacagcggttttaaagaaatccttacggttcatgccccaacgggcggtactttttataaactatccttcccccttccgctgtcaaatcagctgttcctctatataccctccaaggatattgaagatgttctgacagctgccaaaatggctgactccgtcatacaattattcctgtcacgtccaagccagtccgtgcaatctgtacggcaaagcgataccatgctgcttttggatcatctgttccatccttccaccgcagaagaagatacttacaccgccctgctggccgcggaacttggttttgatatgtctctgcccagggctgtgtgcatattccgcatagaacaggaccttaagaatccggcatcaaaaatatcttctacccgttccattctgcagaccatacacaattttgcggcctcctctggcagtcaggatatcatcggagcatttggaaacagcgaactcatactttgtcatgtaatgggggcagagtctgacaaagatataaagcttcttgaaaatatttatacgtatatcaataaaaattactttgtttcctgctgtatcggggtagggctcaccgtaacagatattggacattactgcgacagcttcatttctgcccaggctgttttcaggtacgcacagaaccggccggacagagaaaaacgaatctattatatagatgactttttggcggaacaccttgtatacgaaatcccggaacacttttttgaacactttttcaaaaatgaacttaactatgtcaaagctactcccattgcccaggagaccataggcgccctggttgcctgcaatatggacatatccatggctgcggaggctcttttcatacacagaaacactatggtattccgcttaaaccagctgaagaagcagctgaatctcaaccccttccacaaagacaacgacaggttcaagctgatacttctctatcattattttacaaaaaagtacaatggaaaccattcatcaggagagatgccgtaaacacaagaatgtaatgattccgtgacatcgggtatgtttttcattcttctgttttctccccgggcgcccacactgccagctcctttaccagcatgatgcgcccaattattacacacacagctcctgcggtattccacccgttgcttcccaatacaaccgagtattcataggacgccagccctgctgtcatccatatgaggtatccaagggaggaaggtccttttttgcagttttgcgtatactgcctgctaagctctccgtaataattcaacgtactgcacccgcaggctgtctctgccagcataaggactgccgtgatctgtatggatatccctgtgctctgtctcatgaacactgccagaatcaggtccaggatggtaatgcccagccacagtctgcctgtctgttccatcttacggttccactcaaatccttccccgtccccctcccgttccagcatcctgaaaccgctgcgaaacacaaggcagcccacaatccccggaactatgggtatccccataaaatcaatgtgaaatgacaaaagaaacattcccgccatcatccattttgcggcctcattcacggtttaatccccctttccttcaggtaacggtatgtctgcttaaaccggtctgtgtttctgttattttgccggtccaggttcgtggtaaaccaggactctcctcctgagccgtcagaacatttccactgaatcagagcggtatagggttcaaattgttcccttatatctccggtcccgcgccatgtagattccaccagaaaggtatccccttctgtcatcgcagcaggctcccactcccatatatccgttccgtccactgtaaccttgaattctcctcttacctgttccgggttttggatctcaaagccttccagacggcaatccctttgcacaagatagcgggtcatggaggttccgtcggaactggacgatcctcctgtgaccgtaacatattccatgggcttatccagagtaaggatgatttggcctatggacaccacctcctctgcgccatcgccgtatctgacttttatggtatccagagtgattcccctggctccaaggcttctggccggcagcatcatcttgacaaacagctgcttaaactggtaccggccgtcctgcacagagcctgaataggactgaaacaggccgcctgctccgtcgtatggggtcatccagtattcccctatgccttccagctggggaaaggtaatttccgccactttggaggtatcctcactgtcctggatatagtatatgggaaattccttccacacatatctgtcctcaccggcagcgctccctgcatctacatccgcattcccatccgtactccccatcgtatccccatccataccgccatcccagtacatctccagctctatgtgcataggaataaacacaggatgtctcagcgcaaaataatgctgcagcagactgccggccgccacgattaaaactccggctgtcataaaaaaataaaacaaaaacgcggactgatgaatgaatcggtcttttggcctgtccatactgccctcctcttctttttcttccttaattttccttccctttctaatattgtatataatacaggcccgggaagcaaattcatttccctttcgtttcccttacattttacacaggattgcatactctgttcaaatagtatatccttagttataagcagcagtgcttatactgcaccatataagaatatgattcatgggaggaaataaaattgaagcaggcattgatcatcggttccactgtggcggacgtgaccgtcagactgccccatctgcccgttaccggcgaggatgtgattgtggagagccagtccatgtccctgggaggatgcgcctataatgtgtcggaaatcctccgccagtccggtgtcccatacaccctgttttctccggttgggacagggatttacggcaactatgtaagggaacatctaaaacggaagcagattcccattctcatccccgcgcctgcggcagataacggctgctgttactgttttgtggaagaatcaggtgagcggacctttgcggcccttcacggcgcggaataccgttttgaaaggcagtggttcagcctggcagaatccctgtctgtcggctctgtctatgtgtgcgggctggaactggaggaggatacagggggcttcatactggattacctggaagagcacccggaatacactgtatactttgcgccgggtcccagaatcagcttcatcccccaaagcagtctaaggcgcatgttttccctgtctcccatcctgcatctcaatagagatgaagccctggaatatacaggcatcacaggaagccctgagaataaaaaaccgtggaaaaaagcggacctcccctggcgggaatacaggttagaagcatgtctgccggaggctgcctcccgacttacagcccttacccgcaatcatgtcatcatcaccctgggagcccatggcgcgttccatatggagccttcgggaaagcatgccttgattcccggctgtccggcacggcaggtggatgccaccggggccggggacagccacatgggtgcagtgattgcatgccgcatgaagggttttcccatggacaaagccatccgcacagccaaccgtatatctgccgctgtggtggaacacgccggagccgggctggacgatgaggattttctgcgcctgaatgcctgagatgctttgattgcctgggatgcttcgattgcctgggatgcttcgattgcctgggatgcttcgattgcctgggatgttttggaagaaaattgtaaagatacgtaataggtttgaaattgaactacgctatctcatggaatataataaaaatggaatataataaaatcatggcaggaaccactgcggcccaagcagcctcatggttccggggagaaatgtttgaggaggaaaagaatatgatgaccagagattggaatgcccgcggcacaaaggcctgcgtccggcctgttctgcgctgtttgttccttctcatgatattcactgttttcatgggaattacggcatttgcagctgcagaaaaaatcgacacggtaaaattatcattcacatgcgatcctgtcccaaaagcaggagaggcaccggggaccgtgactgccaagaccggcagcagggagttcaccgtaaaaagcactgagtataccaatgatgtggaggtatggagcctgggagacaaacccagggtcagggtggttctggaggcggcagacgggtaccgtttctcctacaccacatccagccatttcaagctcagcggacgcggcgcggattttatcaaggccaagatatccgacagcggcagcaccctgaacctggagtgctatctcagccaggcagacggaaaacccggtaaaatacagggactggactggagcggattccgcgccagatgggataaggcagaagaagatataaagcattatgaagtccgcctgtaccgcaacaggaatcttgtgaccactgtcactgcttccggtacctcttatgacttccgaaatgaaatcacccgggccggcgattacaccttccgggtgcggaccattgcccggtatgcggacagagccggggactggtctgagtattccgatgaaaatacggtcacggaacgccaggtttcaagcaatggaaacggatcctggatccagaaccagtatggctggtggtacagatactatgatgggggatacccttctaatacctgggaaaaaatcaataatacatggtattatttcaacagggacggatacatgctgaacggatggcagcaaataagcggctcctggtattatcttggcgcaaacggagccatgacccgtggctggcagtctgtcaacggacgctggtactatatgaacggcgacggcgtcatgctcaccgggtggcagtatctcggcggacgctggtatttcctggacggcaacggcgccatgctcaccggatggcagtttatcaacggacgctggtatttcctggacagcagcggcgccatgctcaccggatggcagtttatcaacggggcctggtatttcctggacggcagcggcgccatgctcaccgggtggcagttcatcaacggacactggtattacatgaataacagcggcatcatgctcaccgggtggcagttcatcaacggggcctggtactacctggatggcagcggcgccatgtatgcagaccagacaacaccggacggttattatgtggacggcagcggaaagcggaattagtatataccaaaggcagttgtaaacaaaaccgcacagcttcagggcaccccggagagaacctgttttactctccgggacgccctgtacattttactccccacaggacgcctcccgctgtgcctgcaaagctgcagaacaaacacaataacagcctgctcttcatctgcgccagccaccagacatccccagcctcccccacggccgccatatcagaacgcagttcctctattttcccggaccagaattcaaaatcagaccatctgctgggaatcaaatcaggaggtatcttaagctccagcttccatgccaggaataagcccgccaaaaaaaatacggcagccaggatgaatgcctttgccctcgtctttgccctcatctttgctcccgcctttgccccccttcttcccatcaggacggagagcgcccataccgaagttatccacaggggcagacacgctccaaggccggcggcagcggaaacatacgctccgtccaccaggaccttgccggacttaatctcattcctgtaaagaaaatttaccgctgctgcttttcctgtctccatcccatgggatgtcccttcctcccccgtacgcccttctccgctccttgcgtatgtaaacatcatataccgcatggcgtctttgtccttggcaggcagcagtatgacatgggatgagtcatctgtgactccccgtatcttgtaaggtttctgcctgcaccagatgtattttcccgctacatccagacctccgaacagttccatggccagaccgctgctgataaggcatccgtcctggtccgagcggtagccgtatgttcctccaatcagcctggaatatgacgccatttccatgagtccgtatacagcgatgcagtccgcctccccggaccttcccagtccggggttcattaccttcagcctttttgcacgggaccatgctgtgatttcaggcagcatattcctgccttgttcctgttcactgtccagtgcatgggtaatcagctgtttctctaccgcgtccccttccccaaagtacatgaatacatggcagccggcatccctcatggtccaggccaggatggtcccaaaaccccataaggcggcaatgagtataagtatgatccattttttcattcttccaccaccctgacccggtctccttcactcactggtttgctggattctgtaatcagcttcatatcctttgtcacaggacctgacacagcagcggcagaactgctcttttccagtacatccacctggattctcaccgccttttgttcgtcacccagtatggttttttccggctctgcagccagacagtaatatcctttattatcctcacgcagtgcctcaatgggaatgacacaagggtatgccccggactccatgttcacggtaaaggataccaggtctcccagccttccctcgccttcctgtatccaggctgttacctgtattttcccgtcctctgccatctggtccacggattccacttctgtttccacattctttgactgtcccgccatcttcacctgcatcatgacaccttttttcagaagacctgccccggctgtctccttgtcaatctgtgccctcatctccaggccccccacagccagcctgagctggtgtccgtcctgtatcctgtcccctgcctgtaatccggtatccactacaaccccatccaccggtgccttgatttgtcctttgttatctatgaattgctctatctttcccagctttttctgaatttcctccatgtcaagcttcatggactcctgtttcagacctgacatctcccttccggcagcttcccctgccgctgtaccggcatccgataccctcgcattttccaccttttccatggcctgatacaggccttcctccaaatcctgaacctttcttccagcttccttaagcttctcatcctcagcctttaatgcatcctcatacgcctttagcaagtcgtcctgattttccctttccccgtaatccacatcctcataatcttcctcggccgcatacatttttgccctggcctcctccaccttcaggtcctcttcctcccggatgtcctccaaatcctcccccgctctctcaagttccagctcagcccgttccagctcttcatcggatcccccctgctcctccagacggtccagttttttctgtttatcctccacctcccgctccgcctttctcacagcagaatccctggatttctgggctgactcatatgatcttctggcacttttcatggccttgcggttatcctccttcacctgttccctggttctgttctttttctgcacataatcgtgttccagctcaatggatgcctgctcatggtcctccttcgcctccgcaaaatcctggtttcccagctccagggctctctgggcagcggccagctgctgcagagccagggtctcttcagtcacccgcggcactgaggcaagggacatctgttcctgtttcagcgccagctctgcctttttgtattccagggacagggcgtcgcgctcctcctcaagtccttccatctgaagggtcaggaccgtgtctcctgccttaacggattgtccgggcctggctgcaatttcctccacctgcatattctccggcagtgatatgtataccgttcttccggcagtaagctctccctctccctgtattgtgtagagaaccacatcctgctttccaaaccctgtattcacccgtatgacgataaaggagtccatggctctggacagaaaggtcagggcagccatgagggccaggaatatggccgctgcttttttcacgttcattgactctcactccttgattcctgatgcggcaatcccctgctccagcgtctcctgtcccataaggaacaaaagaacaggaagcaccatcataatgaccgaggcagaccatgcagcacctgccttatcagccgtaatgtccggcaggtaaagggacagcggccagagtctctgctcctttaaaaatgtcatgggctgttcaatggcattccagtattccaggaaccccagcaccagcattgaaatgattcccggccgtcccaccggtattcctaccttcataaatatagaaaagtcaccggctccgtccagcctggccgcctctatgagaggcgttgggatggatgcaaagaattttgtcatgataaagacgggaaaagcggaaaagattcccggcagaatgacagccagatgggtatttaaaagatggaaccgcttaaggaccagataactcgggaccatggtcacctgaaagggctgcatcatgagaatgatatagaaaagaaacaatgctctctttccgggaaaacagaaatgggcaaaggcccaggcgcccggaagggctataagcagctgccctgccagcaccagcccggtctgcagacaggaattccaaaacataacataaaatcccggtgaatccaaaagcagctccacaaaggggctcagggttgggtaggagggaataaaagctgcctttatgggagcgtttcccatgccaaagacagcgccgaaacgttccagcatttccccttcggacatcagcgcgctgcctgccatgagtaaaaggggaagccatataaaaagacacagcaaaacgaggaccgcatgtattaaaatacgttttatcatctctttttccttttccaggtccacagcagcaccggaatcataatggatacctccaccatcacggatgccgcgctcatcttctgaatgtccagggatacgaaccaatggttgaacaggtgctggagcatatagatactctcatgtgggtaatcccctgatatcaggtatgcctccctgaacaccttaaaggaattgataacagacaacaccagcaccagaaaggccgtacttttcagccccggcagagcaatatggaaaaagctctgccaggaaccggctccgtccacctttgctgcctcaaaaagctcttttggaattccgtccagtccggccagccagagcatcatatcgtagcctgtgtttttccatatataggtcaataccaggatataaaaagcacttccctgattcagccagtcctggctgctcccgcctgcccataccaccatctggtcaagaatcccctggggataaaacaacagcttccacaacagtacaacggaggccaccggtatggccattggaagcagaatggttgttttatacaggctccggctgtccgcagctcccgtcataaggatggaaacccacagtgaaaaggccatcagcacagggatgcacaccaggataaaatgcagggtattctttacagccagccggaatgcctggctgtgaaagacctgtataaaattctccattcccacaaactgtccgcccactgcctgaaaaaaggagcggaccaccacattcacaaagggtatgagcacaaatacggctgtccccgccaaacttggggccaggaacagccatggcctcagattcctgagataaatgccaaatcggttcccggaagattgatttatagcttttctactccgaaaaatacagcattgctttgttctgcgcattctgagccgcctgttccagggacaatctcccctcaaaatatccctttgtctcattgatgataatatccgtcaaaacccggtccatccgaatggggtgatccgcctttgccgccacatcaaacaccagctggcgttcttcctttgtaggccagctgccggtcagctcgtaaccgtcatctccgctgactgcaacggatgtatccttattatcttcccgatccacccagtcccggactgccagggtattgaccggaaggccgtctgaaaggtcctttgactggacgtcgcgtcccagcacaaagagaatgaattcccttgccatctccttattttggcaggcctggttgattcccatggtgcctgagggcaggtaggaggcgtttacattttccatggtaaatccgtgttttctctgtactgccagaggcagcaggatattgtacataccatctatcttgtcgattgcaacggcactcatcccctggtccacacggctatattcgctgcccaaaagtccgtccaatcccggcataaggttatagacattgccccgtcccccatcctcggatttatcaaaggcagacttggcgccatttgcctctcccaggaccttcactgtctccagcagctccttaattttatccggatacggctttcctgtccgcatatccacgacttcatcgtaccgcagcatcagtatctggcgcagcagactttcataattggttttgggccgcaggggaagatgggacggatcctcctggtaggccctcatggcatccatggacaccaggctggctgcggcctggctgtccccataggcagccagcagcgtcatcctggtgggaatctggtaaatactcccgctttcctctgtataaggctttgacacctgctctgtcagctctcccgaagctatcatggggcttaagaaatccttcatatcctcaagaatccccttttctatataggattccgccgggagaccgtcaagaaccagcaggtctgcaccatttccgcctaaaagctctgtattgagggctcttatggtatcagataccgtggtgctgcccgacgtgatctggccgtcaatcaattccaccctgacatccgggtgttccagctggaacatagatgcagcctggtgaatggtatctgtctgttccaggttcagcccatatacagtcagcgtctgggtgggcacggaaggcatctgagggtcataggtataatgcttcagctcttccttgtcatcctgggacatccagacataaaaatcattctggtttcccgcaaacagcttcctgagattggcgcttggaaggctcagggaattaagggtgccgtcagccacagtctcccacaggcttcccccctggttcatatggtggattccccggggattggcaatgtatattcccccgctgccgtccgatgccatgggggcccacatgtcaaaatctggtgactgaaatggtatctcctctttggcggacgccgacatgccggaaatatcgtagctgatataggagctttcgctgtacgtgatataccggtttcccttgagcaggcctgttcccttccattccatggaactccactgctggggcagtgaaagaaccagttctccttcaggcgtgtacacatccgttaccctgctgtgagacaggaaaataagtccctcctcggacaccgctgcaaaatcaggcctcacatcgtaatatccctggtcatttttaacggaaaacaccgggtccaaaagcatcatgggttcctgtccctctgtcagcttcatcatatatgtcttataatcatccccgccctggtacagcacataccggtttttgtcctctccccatatcatatgcagggtcccgtacggaaactccagtccctccagcaggctgttgtcctgtttctcccacttttcacccgtccatatgtatctggaagcttttttgtctttgaccgtatacagctccagcacctggtcccctgtctggatgatatcggcggctgtctccccttcttccagggaaatgcttatactgctctccgcatatctccccatcggtccctcctgctgcttttcctcctgtgtctttgattttgtctgctgttcacctgtgctgccgcctgctgtaccggacggcgcagcgcagccccacaaacatcctgacagtatgctgacagccagacacaggctcataagtttatttttcattgtcatttctcctcccggacaatcttcatgtcccctgtatcataccagacaaatctctaaaaaaacttaaaatttggaagaatttcttttaggttttttagagatttgtctgatataatggttttatatatcaataacaatgaggatggtacaatgcggattctattggttgaagatgataaggaattatgtgacgccataaagctccagctggagcaggcgggatacgagactgactgctgcggccaggggcaggaagccttttattatgcatcggaatacccctacgatgtgatcatactggaccggatgcttccccagatggacgggcttggcgtcctgggcggcttaaggagaatgaatattaccacaccggtcatcatcaccactgccctggacggcatcaacgacaggattgacggcctggacgcaggcgccgacgattatctggtgaagccttatgctgccggggaactgcttgccagaatccgggcccttaccaggcggccgggaaattttaagcagagtccctcggccgcctgctccaacatcagcctggatccggagaaaagggagctcacaggacccctgggaaccctgcagctgagcaaacgcgaatccgccctgatggaatacctgattcgcaataagggccaggtcctccccagggggctgattctctcttacatatggggtcctgactcagatgtggaggaggggaatctggacaactatatctattttctgagacgtcgtctcaaatccataggagccctgccccagattaagacggtccacggaatcggataccgcctggaaatcggagggacccatgattaagcggctccggcggcagcttaccgccctttttaccattaccaccggactgattctgaccctggtggtcatcggcatcctggtcataagcgccagggaattcaataaaaaaaacctggactcctttcagaaccaaatcctgaacatcacctcacggctccagtccggctccaccgtcagctgtacctggctgtccaggctggaaagcgataaccgcctgattatacatatcgaggacaacggcaggcctcttctctaccacggttcctggactccggacaccaggcgggacaccttaatcatgcgggccagggaagctgccagggccgagcgcattgacccgtcatcaaggccggtatcctcatcgcttctcagaagctctgtatttacagtgacaggagacagcaatgacacctatctgggcagcgtgcttgttcttcccacgcagacaggatttcagagccttacactgctggccagcaaggactccatgggattcggcctgttccgtcagggtatcctgttccttcttctcaatctggctggtatcgccgcgctgatgtgcgtcagctggatattggtggggaagtccttaaaaccgttggcagaaagccagaaacagcagaatgaatttatagcggcggcatcccatgagctgcgggctccccttgccgtcatccgctccagcatatgcgctgcacggacagctcctgaccagagagaaaaattcatggctaatatagaccgggaatgttcccgcatgtcctgtctggtgggggacatgctgcttctggcctcggccgacaccggacagtggagtctcaggacctcctccctggacatggatacccttctaatcagtatctacgaacggtttgaaccgctgtaccaggacaagggcgtctgcctgaagctggacctgcccgaagcctcacttcccaggatatacggcgatgaaaaccgcctggaacagatttttgccgtcctcctggacaatgccctgcgctacacgccaaaaggacgcagtgtcactgttgccgcatccgtacagacagataagcatctgctctcccgcagccggagcatagtctgtctcaccgtgtcagatcagggcagcggcatggatgacgagaccaagaagcatatatttaaccggttctaccggggagacagcgccagaagccacaagcagaattacggattggggctcagtattgcaaaggagctggtacagctccacaaaggcaccataagcgtgtcggattcaccggacggaggcgcctgtttcctggtccgtctgcccgccgtacccgaatctcacgcttccagcaggtaacggtccactgcctcggcgcagccgtcgtggtcattgtcagccaccaccacatcgcacagttcctttatgtgcggcagggcattgcccatggcaacagagagaccggcaatccgaagcacctgggcgtcattatcggcatctcccacaatgatggtcttatgaagcggtatgtccagatgtccgcacagccacaccaggccgctggccttactgacattacggggggacagctccagggaagcgccttccgcaaaggcaatagcaaggggaagcccgcatatcctggaatgaagccgttcccggatgtcagcggaggcggaaaacaggttcagcttctccaccgggaagggatgtttcctgtaaagggccccaatgtcatccgtcttattcactacccggtccatcatctcctggtagacgcccatatggtaatggctggtatccgccacctggcttgcgtttgccagagcctgtccgccgctcatcatgtataccatcacatcctcatgggcagctgtttcaagaacctgttccaccaaatcccggggcagggtctctgaatggaggatgctctggttcaccgcgtcataaatcagggcgccgctttcgcatacatagtggctgacattggcaaggacatccctgaattcctccagctcgctgatacagcggccggtggataatatgacgcgttttcccatacgggcggcgcggtttacggcttcaagcgtacggtgtgatatggtcttttggctgttcagtatggtgccgtccatatcaaaaccaattaattcatagtgactcatgaaggttcctctttcatttccatttttctctcctaaagaatacaccccatttcccaaagtatcaataacaaaatcacagcttccctcatgttttttcccattcccctttctcatggaatcgtaagaatttttcagcttttcttcaagtcttatggagctgattgtattatattggttgtatggaagtatgatggtccggaaatatgattggcctttattggcaggaagggagcgtttcatgaaagaaaaacacagattgattcctgtattgattttcgcatttattttgactgtcctgtgcacggctgccgtatcacgttggtacctgctgcaccagaaaggcggtacctataactccattctcctgggaaagttggtttccagcgacggcaggaagctggttttacagggaaatatcacaaatccccaaggcaggaacggacagtatgccatcacatacagccccggtataaccgcagctgacaaaaccaaggattctcatataacaccgcccaccgccatcccgcagctccttgtcacatacggaccggacaaaacggaaattccttctttttcaggaggatatcaattatatacgccggatgatgaggggacagcagaggctgtcattgcctgcggagccgaacctctctcctatctggtcggaaaggtgccggacattccctacgtcaaattggggacagatatttccctggatttcagggaaggcactgtcccagattcggtcacggttcaggacctcatactccgcggcgacggctccccgaaatacacggaacaggtcacagaggaattcaccctggcctgttccggcagcgcggcctgttttaccctggatatcaacagcgcggctttactgagttctgatatgtcttcgtatgaagaagcaggtattttgagaggttttcgtgtaaactgccggtgggatgacaacagcacggcggaatacggctttgtcatccgcactgacgcttcatccacagaaatccgtaaccaggcagactgacaccggatgcctccatgagatctcctgtaaccatatccccatacattccgtccctttcatcaatccacgcagtacggcgttcgccgctgaaattaaagagaccgatgagttttttgcctctgccgtcctgccttaccatacccaggacagagttgtcccaagtctccaaggtgcggaaaggacacccggcatccaataggggttccccggcccgtatggcctccaattgttccagattatggaaaatacgattctggactgtttctggttcatttatccgttccaccagatcccattgaaattctcccctgtgtatataccgggagtccggtgccttttcgggattgtccttataggtgtagtcattgacctgtcccacctcgtccccgctgtaaagcacagggatgcccgactgaaacagcatgaacgcgtggagcatggtatccagcctgacagcctcctccatggcctgcctgtcatggcagaatcctgctttttccacaccgcacatggaggcggtggttccgcagaaccgggcgtcgcccgtggccgggtcgtcattgtacaggacgccccggctgaaactctccggtatccttcctgtaaagaaatcattcagaaatttcttatggggaacctgcctcatcccccacctttccaaaagaggataatccagtccccagcctatatcatcgtgacaccgcagataattgaggaaggtacaggcggagggcagggaactgaccgtctccatctggctttttaagagccttacatcctttgtggctgccgtgttccagatggccgccatggtggtcacattgtagagcatatgacattccggcttttccacggttccgaaataaggagccaccttctccggctccatgaccacctcccccagcagcaggataccgggacacacgatttcgccaatcatgcgcatcatcctgacaatggtgtggaccctgggaagattgcggcagtccgtccccaattccttccatatatagggaaccgcgtcaatcctcagcacatccaccccgcggtttgccaggtaaagaaaattgaacatcatctcattaaagacaacaggatttctgtaattcaggtcccactgataaggataaaaggtggtcatcacatactgccctgtttcaggcagacaggtgaagtttcccggcgccgtggcgggaaatacctggggcaccgtctcctcaaacatagagggaaccgtccagctgtcaaagaaaaaatatctgtcctgatattccttttcccctgcccttgcccttttcgcccacccatgatcctccgacgtatggttcatcacaaaatccaggcaaaggctgatgcctctgtcgtggcattcatgggccagctgctccaggtcctccatggttcccaaatcctccctcacctttctgaagtcagatacggcataacctccgtccgaacgccccctgggggtatctaaaagaggcatcaggtggagataattcacatggcactgagcaatataatccagcttgccttccacgcccttcaggctgccggcaaaatgatccgcgtacatcatcatgcccagcatggagctctttctgtaccagcacgggtcctcctccctggcagcatccagcgctctgagaccccctgcgcgctccttgtaaaacccttccattccctttaacagcccgtcaaacatatcctgactgttgtagagctccatatacagccatttcagttcgtccatatgcttatccagacgttttctgtagatgttatcgcgcttcatccccttcatatcctccttaaatgtacctggaacgcctggtattcccctgtcccggacggaatggggattccggccgacataaggcctgctcccggatattcggtccctgtatcctcatccctgtacatggcctcgggatccagcccctccaaagggatatacaatgacagcggattgccgtgggtctccagagcaactgtatttaacagcgcctcccccttatcctcactcacaaagagccatgcggccgcttccctgtcctcaaagggattcgtcagccggtaatacgccccgtcatgaatcagatgccagtatttatggtacgcgtctatctgctccctcacacaattcttgtcttcttccgatatggcgcttaaattcagctcatatccaaaacttcccgccatggcaaccactcccctggttttcatgggcgtaattctgcctgtctggtggtttggcactgctgatacatgggaacccactgcgctgattgggtagccaaaggaagttccgtactgaatccggatgcggtccaccgcatcggtgttgtcactgcaccagatttggggcgtgtaatacagcatgcctgcgtcaaaacgcccgccgccgccgctgcacccctcaatcagaaggtccggatagcgctttgtcagacgctccaggaagtcatagagtcccagcatataccggtacaaaatactgcccggactgtctccacccgccattttacctgccgcggaatatacgtccgctatgctgcggttcatatcccatttcagatactctatatgggcgctgtcaaggacccggcagatactgtcaaaaatataatccgccacctcttttcttgaaaaatccagcaccagctggcttctgccccggaccggctttcttccgggcacagtaaaggcccagtccggatgttccctgtaaagactgctgtcctcagacaccatctccggctccatccagattccgaatttcattcccaggccgttaatccggctaaccaggctgcccagggaaccgccgagcttttttacgtttacctgccagtctcccagaccggagcaatccgaatcccgctttccgaaccatccgtcgtccagcaccatcatttccacgcccagttcctttgcctgtcttgcgatatccagtatcttttctccggtaaaatcaaagtaggtggcttcccagttgttgatcagcacaggccggggaatggtcttgtactttcccctgcaaaggctgtggcgcatggccttatggatgctgcgcgacaatgtacccagcccatggccgctgtaccccatgataacctcaggcccaaagaaaatctccccaggtttaagctcataggaaaacatctcatcctgaagccccatagacatcctggtctgaccgtactggtccgtctccgcctctgccttaaaagccccgctgtacacaaaggacatgctgtaacaggggccatggttttcggttgtctcccgtcctgccagtatcagaaatggattatactggtggctggaagtccctctgcggcttcctatgacctgggcgccgtggcacagggcggttctctggaaattgcgctccattgcgtggcgtccgtaaaactgaatcagatcgtattccccgtgaaggaagtccagacatgcactgtatacccgtttcagggctgccgggccattcccttcatttttcacacagactgccctggtaataatgtcgtatccggggaatacgccgtagagcaacgtaaccgccagtccgctgacctggtctgtcaggtgtatcttaaggctctctgcgtcctccaggccctccccatacatggaaggaaggcctggaaggctgtatttccctttgcttatttcatatcctccatagcgcagattcagcccataggatttgtcagcctgttccactgcaagggcagggcttctgaagtcccctgagccctgatatggatattcctggggaagggcgtccagggaataggttctgtcatcacctgcctcatatggattgggtgagaacccccggtccccaaaggtaagcagatattccatggagccctctgtcctgtccccgtagtacaggtgaagcagattcccataggaatctgccttcatctgatatgtggagtggtccgtgtgaagggtgaatatccttccattttcctgatactgtattgccatgtgtcatcctccgtctctgttatccgtctctgttatccatctctgtttttcgtctctgttatccgtctctgttttctatctttatctccatctctattttccgcctgtcattgcaattccttctataaactgcttctggaataccagatacagaatcaccatgggaaccatagccaggacagagcctgccatcagcaccggataattggtggtgaactgccctctcagggtagaaagaccggcagacaaggtcatcatgttcagatccgtgttggcaatcagaggccacatcagatctgcataagcgaacactgcagtgaagatggtaagggcagccatgctggccttggtcagaggcatcatgaccttggtaaaggtctgccacttggtgcagccgtccaggtatgcagcctcccccagctcatccggaatgcccatgtaagcctgcctgaggaaaaaggtgccgaacgcgctgactaaccccggaaataccagcgcaaacatgctgtttgtcagtcccattctggctaacatctggtactggggaataatgaatatctgggacggcagcatcatctgtacaatcaccagggagaacaaaaggttctttcccctgaatttaagctttgcaaatgcgaacccggctgctgaggaaaacgccactgcgcagagcacccgaaacagaatcagcagcgccgtattcacatacaatttcataaagggcagggaggcgatggctcgcaggtagttctccttcatccactgcttcggcaggatggtcggcggaatctgtacgctctcccctgccgacttaaagctggtgaacaccatccatataaacgggaatatcataagcagggctcccgctcccagggccgcatacacaagggcggtattaatactgcggtttgtctccaatgatttcatattttccctccatcctaaacttcatagttgacccacttcttctgtccccagaactgcagagctgtcacggctcctataagcagtacggtccacacaacaatggcggaagcatacccacggtttcctgccacaaaggactcacggtaaaagagatacatcagtgactgggcgtttgtaagggccggattagtctggtccaccatcatgtaaatcaggtcgtacaccttaagggatgccatgagccgcatgattaacaccacaaagagggtgggcgacaccatgggaagcgtaatcttaaaaaactgctgtattttggaagccccgtccaggctggcggcctcatagtagctctttgatatgttctgtattcctgacagcagcagaaccgcgtcatatcccacggcgctccagactgccaccaccgcacaggccggaagcaccagcttggggttggtcagccagtttatcctgcttccgatgatctggttgataatgccgtactctgcgttgaaaatccatttccacaccatggctatggctgccggcgcaaccaccatgggcaggaaataaatggctctgaaagcagcctttgcccgaatcttcgcattgagcagcacagcggtcagcagggaaaggaaaattcccaggggcacggtcagaatacagaagtaaatggaattccaggtggccttccaaaactccttgttcccaaacatctgcacataattttccactccgctgacctcatagtacccaaagggatgggtggtggaaaagctcagtaccagggtctgcaggaacggatacacgttcagcacaatcagacctattatcgtaggggcaatgagcagatagccccattttgcatcctctgtcaaatattgtttcttacccatcattctcctccagtcctgccatcattacggcgcctttgcttcatccaccagtttctgcatatcctccagtccctggtccagactcagctcaccgctgtatatctttaacagcaggtcgttaatctgagttttccagttgggtctggatgcattgttgacgctctgtacaccataaggaaacatatccacgcatttttggacatccaatttgtagtcatattggtcaaaggcgcttatccacgtatcctccagccccttgtaggccggtatggctgcgcctgacagcccctggaccctctgtccttcctcggaacctgcaaatttcaggaaatcccttgcgtattccagcttctttcccttggctccggtggaataacacaggccgttggatatggtggctctgccgtctccccggaccgggtccgggcacttgggaagcacggccacatcccattttccgatcatctccttgttattctccataaaggagataaggttccagtttccctccaggtacatggccccctgctctgacatgaatgcgttgcccggagccgtctcagcaaaatagttctgatcagggcaccacggctccttctgaaggccgatataaaattccatggccttccttgtgccggaatccagaaaccctgccctggtcttatcctcgttcagtatgtagcctcctgcctggtatacgaaattccagtatcccagctgctcatccgcatatgccatatatccgtattttccggttctttcataaatctgagccgaagccgacgtaaggtcatcccacgtccaggactcatcagggtaagccacccctgccgcatcaaacatctctttgttatataccaggcagaccgtatccttatccttgggaaccccatatatccgcccgtcggagcccctggcatttgccagcgaaatatctgaaaaatggctggtataataatccggctccacatcgtcatataaatccgtcacatcctccagttttccatagtccgcatatttaagaatctgattggtgtgcatccagaagatgtccggcagctgtcctgattctgccgccgcatccagcttggtccagtactcatcccagctggtaacctgaacctggatttccacctccgggttcttatccatataagccctggctactgcttccataccgcctctctgggcattgtcccaaatctggaagttcagatgcaccaatccatccgaggcccttgttccggagccgcatcctccaagcaaagcagcccccagcacggctgcggccgctgtgagaattccctttctgaacgttttaagcataatgtaccccctgtcatccctgttccttctattctaaaaccatccaatttgtcgccttcattccatccggatttctttgataactacatgatatcatgggttttaaggcaggtaaatattctgcttacacaaaaaatatacccaaatgctatttttatacctataacttgatataggctggcatttgggtatataatgattaaaaagggggttttcaggcaatgagcaatgtactgttttctatatttcccaacgagcgcttcgtggatttggggttatatcaatacggctgggaacagtgtgaaccgctgcactcttatggtccctacgccaggaaccactatctgttccactactgcatatccggcacaggcaccctcatatccacggattccaaaggggaatcccacacctaccagataaaaagcggggaagggttcctgatttatcccaagcagatcaacacctactttgcagacaagaaccatccatgggagtacacctgggtggaatttgacggcctccgcgttaaggaagccctggagctggcaggactgaccatggatgcccctgtataccattccaacgcccgtgacctaagcctggatctgaaaaatgaaatgctctacattgccaggcactccgaccagtcgcccttccacctgattggccacctttatctgttcctggactatctgacccgctcctctgcctcccgcaggctgttaaagacaggccgtctccaggacttttatatccgtgaggccacatccttcattgagcagaacttccagaacgacatatcggtggaggacattgccgctttctgcaatctgaaccgcagctacttcggcaaaatcttccgcgacgcagtgggtaagagtcctcaggaatttcttatcagctaccgcatgaccaaggccgccgaactgctaaagcttacggagctgagcataaacgacatcagcaatgctgtgggttatcccaaccagctccatttttcccgcgcttttaaaaaaacatacggcatcccgccccgccagtggcgccaggaaaacaagatggctcctgccacctagggccaggagtttttactgccgtatcatatacagacatatggtatacagccgtatacttacagatacttctcctcatactcctccacgggtatgggcctgctgaacaggtatccctgggctgtctccaccccgcaggtacgaagcacggacatctgctcctctgtctcgattccctctgccaccacccggattcccatttttttgcagattcccgctatggactcaatgatggcctgggccttggggttattgaccatgtcgtccaccatggtcttatctaatttgagcacgtcgaattccactgaggataacagggacagattcacatactctgttccaaaatcatccagggcaactgtaaatcctgcctggcgcagtttccctatgagctcctttaagtcaatttccggcgcgttccgtatgctctctgttatctcgatttccagcagtcccggagagattccatatttatcacacagcttcaccagctgttccacaaaggagggctgggccagggaaaacctggaaaagttcactgaaacaggaaatgcctgcttctcccggtcagcccactcctttaccttggaacagataaattcaaagacaaagaagtccacctggctgatggtctgggcttcctccagaaggggcaggaaattgcccggcagcaccatggacccttccttggactgatatcgtatcagcgcctctgcccccaccgcggaccggtccgcagaggaaacctttggctgcacatagaccacgaaatgattctttcccagttcgtctgccagtacctccgggttggacagattgattacctcgtcgctctggtgcctgtagcgccgggacacaggactccggcggtaaaattctttcttatcctcatacatccttgcatctgcatccgcaataatttgggacaaatcatcgcttccctctgcccagcggctgcccacggctgccctgcatatggaatcccgctcaaaattcttcctgagcagctccaccttttcctcaaatacttccttgctccattcccggcagatgatgacaaattcatccccgccgattcggtagaaatcagctccatcaaacgtctcccgcatcctcctggcgcattccaccagtaccttatctccaaatgcgtggcctctcaaatcattgatatccttcaggccgttgacatccagatatacgatgcccaccggggaatccgtaactctcaggttatccgtatcggcagtataccggttgcggttgtagaaggaggtcagggtgtcatgatagctgagcctgtttaattccttttcattctcatccctgcggtaggacagcataaggaaataacccagcgtgcgcagaagggggccgatattgaccagctgttccaaaggtggattatccactccaatggcaccgcagaaatgaccgtcccgttccagaggcgccgccaccagactggtgatcccctgggccgttaaaatctcatactcattcctgtagttctccttcagatcctgcacatcctctaacaccatacattcctgccggtcaaagattttaagccaccggtcgatgaattccagaggcaggccctgcagtgtatccatctgggattccacaccctcggcgcaccactcgtattcattgtacagcttaccatccctcagcatgaatacataagaccggtccgcgttcatgaaccgtcccagtttatcaaggatgacggttagcgtatccccgatgcccctgtcctcataaaggctgcgcacacagtccaccagcatatcctctgcgcgaagggcaaacttaaggctctgtttctccttttccgcttccgtcacatcaaaggcaatctccagacgggccggcctgtcattccattcgatcaggcggtcctttaacagataatggcggcctgttatgggattggtattctcccacgtgacaatattaccgtaatccgtaaaatgctcactgcagaacggacatggctcactgagcccatggaatacctcataacagcgctttccttcaatggaatccagatgaaaatttctcatcccggcctcattcagaaacagcagctcatgggtctccacatccgagacatacatcatctcggatatatcgttgaggggcgcgcgaagcgtatcccacatacggtccagacgctgcttctgctgccggttggcattttccttttcccgtataacggcctgcatcttatcctgcctgcgctcctgccataccaggattccccacacacccatggcgccaagtatcagaattccgaatcccctgctggtgcggttcacctgtttctcagtatactgctccgccgctgtcacggttgtatccgccagctggaaataacgctcgctgagttcaaacagctcttctgaatccttcccctgcctcaccagcatgatttcttctttaagcacctgccactggtcctccatggatgacagcagctcctggtaggcctgatcattcaaacggatgaggcggttttcccccaccccggtggccagctcctccataatgccgtccaaacgcgcaataagggcgtcatccgtccgcccttttaattcttcctttacaaggcgttgggtggcgcctctgacaacacctgtatagttgatgaccctggcatttccctggagattgtgtatggacacaagggacaggcctcccagtcccaccagggacaggaaaagaacaatgggaatcagtcttttcttcatacgtaccatccttcataaccggatgctctccggcactttcatatcttaagtataacacttaatttcattaaatccagcaggattttactatttattctaattgttaccacaggggtgacttccttctgaaaatgttatataatattgggtatcaaagcaatgcggagaacagatatggatttaatcaaccagttcatagagaattacaagaaaaagatgaacttttatgaaacagccggccggatggctgcccggcagttagagagcgcccttcaggcagccggtatacgggccatcgtgacctcccgcgccaaagccccggggcgtctgaaaagcaaggtcctcatacgcaattccaggcgggcggtcccctataaaaacatgcgtgaaatatacgaggatatcgcagatctgtgcggtgtcagggtgtcactgtacttccccggtgaccgcgacaaggcggacagccttatcaacgaccttttcacccttctggagaccaagcagtttccggaacagtccaaggcgccttcttataataagcgtttttccggttactgggccaaccactaccgggcccatatgagggaggaatccctggaccgttcccagaaaaagtataccacggcccgcattgagatacaggtagcttcggtccttatgcacgcctggtccgaggtggaacacgatctggtctacaagcccctgcagggaaccctgtccgatgaggagctggcgattctggacgagctgaacggcctggtccttgccggggaaattgccctggagcgcttgcagaacgcgggcaatgagcgcatacggaacaaaaatgcagagttcggttcccagtacgagctggcttcctacctgtataattatctcagcaacaatttccgtcccgaggacatagagctgcgcatggggaatattgagctgctgttcaaactcagcagccgcctgaaaataaacagcgtaaaagagctggagccagtgctcaaatccgtgaaattcgagaaggaccggcgcaacatttcccagcagatcattgaccagatgattacgggcagtgaaaagcgttaccatatttaccaggagctgcgggccggccaggacggcataggcgaggacgagcgccatgctgtggaatattttttcagccagtgggttcccctggaacagctgcttaaccgcgtctcctccaaaaactcccccaaggtgcggggagccttcaatatcaacaccctgaagcggctgaatctgctggacaaggagtgcatcaaccagattgtgtccctgcgcaagatccgcaatgtgctgattcacgatattgaaattccggaagcagattatatcaaccggcagggagacgaagcccagtccctgttccacaagctgtcggagcagtttgccgccccggcttaagatcaaaggttacttaaaccggctgcttttggcgtttttcgtggatggtaatggggcacaggcatccggggcgggccatggcggcgggcacaggccgtcatcatcccctcccccagaacctgcggatttcatcccggctcagccccagcgcaaactcctttttcagcaccaggaactgttccagttccagcagacccaggtacagtaaggcccggctctcaaattcctgcctgcggacaggaagaggctgggccttcatttgtaatttcacctgttcgagctcatccagcaatcccagggcattgttcctttcgtggaaagaaccgcttacagattgaagcaggtccgccaccaccagcgcctggtccggtgtggactccattcttgaaaagcagtcccgcatcctgcaaaggatggcaaactggttcttcctcagccccatataggcaagataatagcgtgtgtccgccaaaagactgttctccatcccctcgtaggctctgcgttcgccctgctccaatgcctgccccaatgcctgttccagggcctgaaacccgcggccgtccggctgctccccattctctcccggtgttcccagctctgatgccatccggctcagcaggctgatgaacgtttcttcaatctccccctgtgcagagcgtatggctgtctccgatccgggaatatacaggttgagcacaacgcccactcccgtgcccacaaacagcagaagggcttcattggcaatatccgccattcccatggatccctcagccagaatatgggtcatcaggaccgtgttcacggatatcccctcctgtatgccccatttcatacacagcggggtaaacatcagaagaaaaatccccattgccaaaggccggtaccctgccaatgcaaaggataccggccccagaaccattgccgccaggaaagccagaaaccgcctgcctgtaacccgtatggtttcccgcttcgtatcctggatactgagcagggtaatcacaccggcagaggagctgtatctaaggcccagcgcctgggcagccgccatggccagcatgcttcccacggctatttttaggattttaagtaaacggctgtacctgtgcatatacacctcccggtcactttatgacccccattgtctgtcattgtctgtcattgtctcccaattgaccggcatccatacaagccagggacggacgaggccggctgccagaccggcttataccccgccggaatgctctgccagcttatgctctgccggaatgctccgccagataagcatccagtatggccgctgccagtccaaccagcgccttgcaggggcgcgactggcagtaggcttcggtcctgtcagacggtatgaagctgtcctttcccgttccctccaggcccagaagttcccggcacagcagcgttcccgtcctttccttttgcggctgtcatgtcctgacagccctgttcctgccggacagcagagaaccggctgtccgccggttctctgcctccggaattctccggaaaaatcacttgaaattatactcagttacaatcttctcacgcccggtggtcacatctgtaaaatactcatacaggcagattcccaggtaagaacccgatatattccacacattcctgtacccccggttcacaagggccatacacgcattatagcttctctggctggagcggcagtggagatacacagggcgatccctgggtatctcatccagacggtcccgaagctccgacaatgggatattgacggatgtctttaaatggcccaggccgtactcattcttttcgcgcacatctataatgcacgcgcctgtctccaccagctcccgcaccttcgtcacaggcacctgcctcactcttccatagagcaggttcagggccgccagggctgcctggtttaccacatccttggcagtgccgaataccggggaataacacagctccagctccttcaaatcctccagggtgcctcccatggaaatcatggccgcaatgacatctatcctcttatccgcatttccccgtccaatggcctgggctcccagaatctttcctgtgggatattcataaaccagcttaaagtgcaggggagcgcttcccggcataagccccaccttgtccgtgggtatgatatacacagaatcatggggaatgccggcttctgcggctgctttttcgttcagtccggtggccgctgcgttcaggtcaaagatacggaccgcacaggaaccaatgacccccttgttattatggggtatgccgtacatatggtctgccgctgccctggcctgtctctgggccggtcccgccagagccagtctggacggcttatgggtcagccggttaaacacctggatggcgtctcccaccgcatagatgtcagggtcactggtcctgtaattatgatccaccttaatggccccagtctctcccagctccagccccatatccttagcaagtccggtctcaggcgcaacaccgatggccagcacagtcatccctgccctgacagccttacccgaagccagggtaatgctgtcttccccgatggcgctgacaccgtcatttacaattacatccactccatggtccagcagctccttctggagcatctgaaccatatcataatcaaaaggcgccataatctggtcctgggcctcaatgacagatacatgccttccgtccatgttcagattctcggccacttcaatgccgatgaatcctcctcccaccacagccacatcccggatctggcagtcggtgacaaatttcttcaggttcacaatatccgtcacattccttacagtgaatacattgggcctgtccacgccctctatgctctttggccggatgggactcgcccccggagagaggaccaaaatatcataccgctcctcatagacatccccggtacacccgttttttacccggatggttttcttctccctgtccactgacagcacctcgctgtccgttctcgcctctatgtcatactgcttcttaaacttctccggactcatcatgaccagggcatcgctgttctttaccgtgccgctgaggtagtaggggagggcgcagttggaaaatgacacatgatgacctctctcaaacatgataatttcagaccgggcatccagtctcctggccctggccgccacagacgcgccgcctgccacaccgccaacaatcaatattctcatttgctctgttccctttcttctgatataattctctcaaaacatgcatccgcaatgtccgcagccatacaaatcatgtcgagacagcgggtatcttcttttttataggtcttaaccagctcacagcaggcatccgaaccaaaacgctccacaaattcctccgcaaatgcggccacagccggtttaagctccggggtggcatgagccctctcatgaatgagccgatagctgatggcggaacatcctccgcacagcgcgccgcacgccttcccgcatcccattccccctccgaatccgcccaccagctttaccgaatcatccggtatacccaggcagtattcatcattcagtgcccgcagcatggcttccgcacagttattatccttttcgatgaagtactcataaatcctgtcccttgtcatcttatctctcctgttctctcagagtatgattgatccatattataaatattagcacgttccaagccgtcaatgcaagttctttgacattttccactgaaaagccccttatcctcattttttcctcttcctctggcaggcatgagacagcggcccccccgaataagcagcgggtgagagccgggaacgcagggcggatgagaagcccgccctggctgcgaaaaagggagcctggtttccagcgttccggtgcatccaatcatgatacaccagaacctggagcacccgactcccagttcgcactattctcctaaattctggaatacagccttaagcgcaggatacatctgcctgaacttgctgtactgtttttcatatttctccgtcagttccccatcaggttcaatggtttccgtcactttcacgatgctgtcagcagcagttttcacatccgggtactctttgcagcccacggccgccagtatggcgcctcccagggcagggccttcctcattttcaaccacatccacctttacattcatgatgttggccaccatcttcttccacagcgggctctttgcaccgccgccgcagattttagtgcggtcaatgcggatgcccaagcttctggccacctccagcgaatccctgagtccgtataccacgccttccagcacggcctgggtcatctcctccctgctggtatccatggtcatgccgataaaacatgccctggcccttgggtcgttgtggggagaacgctctcccatgagatagggcagatagaacacatggttctcacccagcttaacgattccctcctgttccctggaaaactccttggtcttaaggatttcctccatccaccacttgttgcaggaagcagcgctgagcatacatcccatgagatggaaatgtccgtccgcatggtcaaaggaatgaagggcattgttgcagtccaccttaaagctctcactggaaataaagatggttccgctggtacccagggaaatgttgcagcatccctcgccaacggttcctgttccaacagcggcagcggcattgtcccctgcgccggcaatgatttttacatcctgtgaaaatcccagctccttagccagttcctccttcagatttcccactacctcatagctctcatacagatccgggagctgttttctggtaatgccgcacagctccatcatttcctcggaccagcacttatgggccacatccagaagcagcatgccggatgcatcggaataatccgtacagaagctgcctgacagcctgtaagccagataatcctttggcagcatgatcctgcatatgcgcgcaaagttctccggttcatttcgcttcatccatagaatcttaggggccgtgaagccggtgaaggcaatgttggccgtgtaagcggacagcttttccttgccaatggtctggttcaggtaatctgtctccttctcggaccgtccgtcattccagaggatggccgggcggatgacctcatccgcctgatccagtgtcaccagaccgtgcatctggcctccgaagctgatgcctgccacctgtgatttgtcacactccgaggtcagctccttcatgccgtccatggaggccgtaaaccagtcctccgggttctgttccgaccatgcaggatgggggaaatacaggggatactcccgtgaaaccaccttgtggattcgtccgcttccatccattaacaacaattttactgctgaggttcccaggtccactcctatgtaaagcatatctttccctccctgcatttttatgcaaatggattctctgtcttatatcttacgctctttggctggttgtagccgatttcctccacatccacgccaatgtacttgaatacctcaaacaatgccttgccgtagtttccgaaggcaacagccccgtggtgcggatagttcttctcgatgagcacatggcggtagaaccttcccatctccggaatggcgaacacgccgatggagccaaaggaacgtgtggcaaccggaagcacctctccctgtgcaatgtaggctctcagcttgttgtctgccgtgctctggaggcggtagaaggtaatgctgcccggcttgatgtctccttccagggttccctgggttacttcgattggaagagccctggccataatcatctggtacttcatctcacagaaggccagctttccggaagcagtgtttccgcagtggaagcccatgaatgtatccttaagtgtgtaatcaaatttgcccttgatatcagcctcgtacatatccttgggcacggtgttgttgatgtccagaagggtaaccgtatcctggctgataaccgtaccgatgtactcgctgagcgctccgtagatatcaacctcacaggacaccgggattccctgggctgtcaggcggctgttcacatagcagggcacgaaaccgaactgtgtctggaatgcgggccagcattttccggcaatggccacatatttgcggtagcccttgtgctcctgcacccaatcctttaaggtcagctcatactgagccagcttggagagaatctccggcttcttgttgcctgctcccagttcttcctccatctcctttacaatacctggaatcctctcatcccctgcatgcttgttgaaggcctcgaacaaatccagctcggagttctcttctatctccacgcccaggttgtaaagctgcttgatgggcgcgttgcaggccaggaagttaagaggtcttgggccgaagctgatgattttcagctcgcttaatgcagccactgcgcgggcaatgggtacaaactcatggatcatgtcagcacagtcctcagcatcccctaccggatactccgggatatatgccttgatgttgcgcagcgccaggttgtagctggcattgagcataccgcagtatgcgtcgccgcgtccctggcacagattatccccggactcctcggctgctgccacgaacattttaggtccgtcaaaatgctttgccagcagggtctctgatatctcagggccaaagttgcccaggtatacgcacagggcgttgcagcctgctttcctgatgtcctccaatgcctgaaccatatgtatctcgctctccacgatgcatacaggacattcgtaaatttctgaagcgtcatatttagccttgtaggcttccactaatgcttttcttctgttgacagaaagagactccgggaaacagtccctgctcactgccacgattccgatttttacttctggtgtattgttcattgtactttcctcctcatacatgattgatttttattgtttgcatctgaaaaacatccattatcatctatatcagacactcaggttctcacccttaaggccgataaaggctccctccggcagaccgccctgggcatggccgataagccatttattcctggcaaataaaagcctgtcctcagggtccttcacttccaccggctccatgtccagattggtgtctcttggaaggacaatcacgcacctgaatccctcgtcctttacatggcagggcgcatagtgcagggtggttgcatatacctccaccgctgttcctgccggaaccagaaatgcctccattctggatgtgtcgtatgtgtggtcctcctcaatatcctgctgttttcccagtatcagaatcaggtcgtccacagcaatgtccacttctgaatcccggtggtattctaccgcattcagtttcttgttatgtccgttgcagcatcctatctggattggcatttgtccgtagattccattctccagctcctttgccgcaggcagggcctccatctcaggcagtgagggtatgtaaataacatcctctggtaaaggcgtttgctccattgcctttaacagaccgctgaaatcataacctgtgatgacccttccataggctttaaatgccggatctgtcaccttcttgactgtcatccccaatgttcatacctccttatatcgggccgtgcgtttttcatcagcaccagcctgttttctctggtatccattataatataaacgggcaaaaaaaacgtgctgttattttacgaactaacagcacttttttgcgatcttcattcccccgccaatgacttgcggttcctctgtttttgattggcctgcttctgattcatctgcttctgattcatctgcttctgattcacctgtttctggttcatctgcttacggtactggctgggcagacagccgtaccgctttttaaaggctttggcaaatgcccttgcatcggcaaacccatggtccagagcaatgtcccccacataacggtccgaattcagcaattcccgcatggcatatttaaccctcaaatccatcaggtatgtgcggtatcctgtctgagcatattccctgaacatatgggagagataggagggtgtaaagccaaacctggacgcaaccatttccaggctcagctccttatcatagttctccttcatatattgcgtaacctgggacagcttatccaaatgccgtttttgctgcacccggaccttatcaatctgctcaattctgaattctgtcacaatcagatagaggaactccataaactggctctttaccttcaggcgatagccgaattcccctttctcatacgtccggtacatggcagtgaccagggctaccagcctggccttttggctctcatccttatccgcaaaggtgatgcgggactcatcgctcatatatccctcaaaggatttcattgggatctgcaggacaatggtaatattggggtcagggcattcaatggaatggatttcattgggattcactatgacaaaatcattgggcttcaatgtgtattgcctggaattaatgaaaaaatccagtgttccctccagcacaaggaacagctccactgactggtgccaatgcttgcttacccggtaattcccatccctcccctcgaatataaacatccgaaaaggaagatcatcattgggaatcactgtctcgtatctgaaatccatcctgcacctccatttcctgcctgtcatttacgatttacaataatctcggcaaaccatatttagaaaaccgtcatcctgtattcctgcaaggccccttttgccatatctgttatgactcacacaggcctgttcagcttaaaaatcaccatggtgactgtcccttcctgtgcccttgtattgctgttaaaatacaagaacagcgtagtggactggggcacttccacaatgagagaactggctccaaatgcgctgcttctggcatttgccgtccaaaagtatatgccatattcaatgtgggaacttccattgtatacaggtgttatctgcatataaccggcatccgccagcatggatgatacctgataggatatgcagtaataccctggagcaagcgtaatgcgggtggaatctgccaggacaatgtttccggtggtatccgcgacccccactcccactggtatccgctgggcattattccacacgccggcaaacgtgataaaggatgcaaacacatcccctgctgcgggaccggtggctccggtaggcccggtggctcctgtcgtgcctgtggctccggctggcccggtggctcctgttgtgccagggactccggctggaccggtggctcctgtcgtgcctgtggctccggctggaccggtcgctcctgtcgtgccggggactccggctggaccggtcgctcctgtcgtgcctgtggctccggttggcccggtcgctccggtagcgcccgtggctccggcagggcccgtggctccggcagagcctgggattccggtcggtccggttgggcccggagttccggccggtccggtggctccggtcggccccgtctccccacggggaccggttgtccccaccggacccgggactcctgctgcccctggtattccccggggaccaacagtacccggatttccctggggtccctgaggtccctggggaccggtaggccctatgactccctgaatcccctgggggccctggattcccattggcccacggggacctgtggggccggtgactcctgccgggcctatttcccctctgggaccttccggtcccatggctccgcggggtccggtatctccctgggggccctcagcgccggtatttccctggaggccaggagctccctgagggccggccgggccctgcgctcccgtcacgcctctctcccccggtacaccctgaggcccctggggaccggtgtcccccctcattcccgcagctcccatgggaccgcggggcccagcggggcctgtatctcccttggggcctgccggccccgcgggacccggacagcagcagcactccttataccagcaccctgctctctccctgaaatcctcctcattgccattccacatgttagttcccctttctgcacatattttgtaataatacattactatcaatatatgcatcagacctgcactgtttccggggtctgtaaatcaggggacttcgtatagtctgaaaaaactttatgcccggtgttttctgctcagcagttaccggtccacacataccttaaatactccctggcagtctggaccagggcatataccctggccgcatctgttgcgggtctgtcatccattttccagcgcggaaaaaacctggttacatggagaggaatctccgggctcagggatgatatccagcccgccatctccctcatctcctcatccgagtcattttcccctggaacgataagcgcggtcagctccacatggcatcggcggctggcacatgtgataaaatgctttacagtttcaagatcaccgcccagcttcctgtaataattctctgtaaatccttttaaatcaatgttcatggcatcggccacaggcaggatttcatccagtacctgatcggatacgcttccgttggtgacaattacatttttcatccctgcttttctcacaagacgccctgtatccctgacatactcccagcccaccaggggctcgttgtaggtataggcaacacctatatttccgtttttcccaagctctgcagccttttgggccagctcctcaggacttacggtcatggactcaaaatccccctctcccgccatggatatctcatgattctggcagaaggggcaccgcaggttgcatccaaagcttcccaccgacaatataacagagccgggcaggaaccgtcttaaaggctttttctctatggggtccagggccatggacgtgattttcccgtaattaacaggaatcactgcgccgcctgtattcttcctggcccggcacatgccggtctgcccttcttccaggctgcaccggttcatgcatcccccgcacacagccctcatgactttgcaccgtgacggataacctcaaaacgttccagctgcacatccgtctcatcctcacctatccccgccttttgcctggcgatggacaattgttccctcaccgtgtccactccctccagatttggaagcagcagtcccctttttctgcccttggtgacaatgacgccgtaacgcagcgggtccagctggtcctcaccctgaatctgctctgtctcccccagcacatccacgctatattcaaggaaagacagttcctccctgcggacagacgggaatctggggtcatggatgcctgcactcactgcgttctgtatgatttcctccgcaatattcctgcaaaccggctctatcgtcccgatgcagccccgcaaagcgccgcccttgcggacagatacaaacactcccgcccttgtctgaagcatttcctccggcaggccttcctctgccctgccaaagggaatcatccttccctcatgcacataatactccagcgaccggcgtgcaagagacacatattcatcctcctccatctgccgttttttacatgtttccctctggcagctctcatataagtccaggaatccgcgcctgccgtcatcccctgtgacccggaacgtgcaaatcccatagcccaccccaaagggcccttcataggtgaggcgcctgggcataactgcctttttatccatggctcctgccatcatgacaaagctgcggtggccgcattctcctgccttttcgcaaaagtcttccggaaaagccagcagctccccaaattccgcttttcccatgacatccatgatccgctcatcatattccggcccctggacactgtacccataaggcccgtcccctctcaatttatgggacaaatccccgctggccacaatgaatacactgcgccccagattctctgctgccctggcaatatagcgtcctgcccggtaatggtcggcaaaggacagtccggatccgccgatccgcaccagcttataatccctgtaatgctggttaataaaatacagcgggacaagagtcccatggtccagctccttttccctctccccctctgtacccataggaaaaccgtcatccccgcagagtctgtccagttcccttacaaaggcttcgtcgtatccggcttctacccctatctgaggagccataaaccggccaaagtctcccctggcttcctttcccggcgatacatgaaaatagtccgcatacatcactgcatggggcgaaatcaccacaagggtgtccggcttcagctctgctgccatcccggccgcctcctggtatgctttaatagtatccttaatcagaatctcctgccctcttcccacatccggcacaatcaaaggcggatggggcaccatgatccccgcagccacagccataataccgctcctttccgtccggtgcgttccaccgcaccctgcgatctttaacaagctctggtttaagtatagcattggaaatcctattttaaaaggggataacccacaaagaaagcacaagaagcactgccaggaacagcaggttaaccacggtaaaccatcccagataccggcctttttccatgggatacatgcgggcgatatgcttataagaaataaggctcgccatggaggcaatgagggttcccagccctcccagattcgtccccacaattaaggcactgtagtccccggaaaatccggacagcaaaagggcggcaggcacattgctgataatctggctggcgcccacacaggtaatgatttcccggccctccagaatccggcccaggaaccggcagaaagccggcacccttcccatattgccgataaatacaaaaaatgcgcagaacgtcaggaggagggaataatccactgccagaaacaggctcctgtcggcaatccacacccctgttatcacaacggccagcagaagctgccacggaagaatgcgggccacacaccccaggctgagcagaaagaggaacagatacagaaataagcggcctaagtaaatcctctttcctgacgcctccatacccgctgcttcctgtgaaaatccgggaaacccgctgaccataggcccctgtcccctgccgttcctctcttttcccggcattctgtttcctgcagccactacggccagacaaaagaccagcatcccaaaggataccgctgtgtagggagccatcagctccataaaacggcctgcgtttaaaccggcttttgaatacagataaaggttctggggattgccgacgggcgtcagcatgcttcccagattggccgcaatggtctggagcaccaccacaggcagcactaacggttccatgccggccatcttaaggaccgcgatggcaaagggaacaaacgtaatcaacgccacatcattggtaatcgccatgctgaagaaaaaacacaggaacaccagtacggccgacacagcccccggaccctttacataacctaacagccgctcccctgcctttttaaacactcccaggctttgaagtccggccatcacggtcatcagacaaaacagaaggccgattgtcttataatcaatgtaagacccatattccctgtccggccttatgaccatggcagacagaatcgccaatataacagcagcgctcagaactgtttcccttttgacaaaccctttaaccttattcatccttcattccccgcttttacgttcataatctcacgactgcttactataccatcgaaaagcccgggaatcaatacaaaatctttaaaacttcagatccctcccccgttgatgcatactctgtcctcctcccccggtttcatccgtcattacctgacagtatcgtacactgcctgtaaccgctatgattaccggaaaacaggcataaatgtctgggactgtccgtccagcacacccttatccgtcataatggctcccggcagggcagccagggcaaaggtggacatcttaagcagcgagctctttcccgcgcaaaggtcatacactgctttttccacctgttccacctgcggggccaggctgtcaacagacagctgggacatcagcccggcagccggaagggccaggcttgccagcacctttccattgagaaccacagctatgccccctccgcttctctttaaggtctccgccgcaatccatgcatcctccgggtcccggtatatcatggtcaggttatggcagtcatgggataccgtggtggcaatggctccttccgtgattccaaaattccggatgggaacaacggtcctctggttcagtccatgccggttgcatacacatgccatagccagattcggatcttgcctgatgcagatatatccgtcctcaacaggcagcgtctcataaaaggccttattgaagggtccgtcatacttgctgtatatcaccagcgtctctccctgggaagcaggcgctttcagcctgaaatccccggggccggacagatagggcagtttcatggtattggtgaacttgagtcctccgtcatagggacttcccagataccttccctcttcagccacaagtttccccctgcagaacacatggctgggccggcggccgtccagggcatccaccagctgcatatccgccacataacccggggcaatcgctccaaggtcatcaaacccatactctctggcagcgttatagctggcgtaacggatggcgtctaatggatgggcaccatagcctatggccttttggaccacccggttcagatgtccttctctgtaaatcacccctgcgtggacatcatctgtgcacagggaaacactgtcatgccagcgatggtccctgattccctccagtgcatccggcagatggttggaaagagagctggtcttaaggtttacatgcatgccctgcctgactttctccctgcactcccgggcactgcggcattcatggtcgctctccggtcctgccagcaagtaggctgcaagggcatctccctccaggcggggggcatggccctgcagatacagattccgtttcagaccctgggatatgatgcggctcattctttcatcccccctgcatacatccacataattcatgatttccgcgattcccagcacctccggcagttccagaaggcgggcaatttcctcctcgccgaacacggccccgctgttctccgctccaggcacagagggtacacaggagggagccagcgcaaactggcgcaggggcgttttctttgcgttgtccagcatgaagctgaccccttcaatccccagcacatttgcaatctcatgaggatccatgacaatggtagtggtcccccagggaagtacggcccttccgaaattctccggaaccatcatggtactttccacatgaagatgggagtcaataaaccccggtatcaggtaacgtcctcccccgtcaaaaatccgttccgaaggcagggccggacattcattgtctgtacgcacccgcacaatgatgccgtccagtatatctacctgggccgggtaaacctccccggaaaacatgttgaccagctgtatattgcagacagtcaggtcacaggggatttctcccatagctgccctgaccatttttccacggtccatccacactgctattttcatacgatttcctcctccttggaaacagattagataaaaaactgaatacaggtcaacagggtaaatataatggtgaaaggagatggaagcttatccattccccgctcatccgtaaacaggtagtacgcactcttcacaccacagtaagtcagaaggccgatgccaatgccctgagatatcccataaaacaaagtggatataatcagcattcctaccggaacccactcctcaatcccaaagtcaatggatttaagtccctgcatcatgacaaatccgataatgagaagtaccggcgtggtggctgcagtgggtatcatcaaaaacagaggggcgaataacacggccagcagaaaaaacagcccggtaaccacggaggccagtccggtccttccccccacctcaatacctgacgcactttccacatagcttgtgaccacagtcactcccatgcaggtccccacaacggacccgatggcatccaccaggaagatcttgccgataatagggaaatttccgttttcatccagcatgcccatctgctgccccagccccagggcagtagccagcgtcccaaagaaatcgcttacaaaaaaagccagtacaaaagcaatgtactccggtctcaaagctcccagcacatctgctttaaaagcaatattgcccagggatgcaacacctcccgatgtgaatatggatgagggtacctggaccactcccatgggaatgccaatcacagtagtgacaacaatggcaatcagcagtgagcttctgattctgtactcttttcctcctgtcttaatgcggaggaaatacagtatgaaacatatgacaatactgacggctgacagaagcaccgaaggctcggagaaatccccgaatccccggaaatccggattcaccagcctggcattaaccagggccgtgcggatgataaaaatacccagccctgcactaatgccaatcttgatatttttagggatcagctccactatcttttcccgaatcttaaacaggctcagcaccaggaacaatatagcagaaatcatggacatgccaagacccaccttccagtcagccaatcccggcactacgatagaataagtaagcacaatgccggacgcaatcccgggagccagagcaataggcatgttggccgccacccccatcagcatggtgataaacgcggaaaccagcgctgtggcaatcagtattcccactgtgtccatccccgtatcccgcatgtttaccggctgcaggataatgatgtaggccatggtggcaaaggtggtcatcccggccagcacctcagtcctgacgctggacccccgctccctgattttaaaatgtttttccaatgtgttcatagcttcctcctttgtatttttattatttaagtttaaagttaaatcgaaataaaactccttttttgtgtaaatcagtactatgataatatggtaataccttattgacggcatgcttttatctgtgcatacaggttgataggggggctgtgggaaaattcattcctgtcacctgcagccgtcatcacaggaatgaatctttataacttaccctctcacaggccctatggattacccttccgcatgacgcaggagattaaaacggatgtggctggtatcatagagagccaccccgtgtatgacaggctcactgttctggtcgtatcccactgcctgaatcataagcacagaagctgccttaaggggacagggatgtcccagcatctctcccgcctcctgcgctgacagggaactgacttctatccagtcccgcaccaccatgcggccggtatattcctggattacctcaaaattagacttttcctgccagtccgtccgggcaggtgtttctgaaaacagatggaggggaatacgccccacactgacaatggctggaatatcgtctgccagatacagcttctccacccgtatacccctgcctcccttaccggtgccaaggtgttccccaacggaggccggtatcctctcctcgtccacggaaaccagcctgcactcaggccggtatccgtttccgctgataaccgaaccgaattcaagcatgccggacagattcaccttcacctgcctggcagcgggattcacaaatgttcccctgccgtgaatgcgcagaagcagcccctcctgctccaggtccgtcagggccttgcgtatggtaatacggctgaccgccagctgtctggccagttcctcctccggcggcagtttccccgcctcattaaaggctttctctgatatcagttttcgcagcgaatctttcacactgtcactcaatgtcttttttcggatgggtgctattgaaggcatattctgtttcctttctatatccggcttcacaatctgcgggcttttccgtatggcactatagtatcatggtaatacctttatgcccagtctatcatatctgttttttcttgcatatggatactttatacgaaatttccttcacaacttcaatagattacacaaaaaagaggcagcggcattctgtttcaaatgccctgcctgttcacattcctgtctgctaatccttcctcccatcggtttcgccattcccgtctccggacagtaccggcaaagtggaaccgccgtagggcatcacaatcaccctggcccccggtcccatctcctttgccgccgcgtcatatgcctcctgcacatggtcaaaaggctccatgaaaatatcgcgcaccagttccctgtcaatgcctgacaccagaaatatcctggcccgttttaacgctctggcaaaggaagcagccttgtgtccgccaatctggaaatccctctgtatccgttttagtatgctgtccaggtcctctgcctccagcatccactgctcaaacacagctccccccaatccttccggacaggcgcccgccagaatgatgatgcctccctgacgtactgcctgctccgcattggccagggccttctgtgtctgatacaggttcagatcctttggagcccctccctgggatacaatcacgatatctgccagctcattgatctccatacggtaaaacccgtccaggaacctgcatccctgtctgtgggcctccttaagctcacctgccacagcgtgaatcacatttttatgctcgtccagaaccacgttcaaaaggaaatccacgccgcagatacctgccgcctcttccaggtcctcccgcaccggattcccttcaagggttcccgcctttgccatggggtgaatcatcctgctgtggtttttccgaatggcctgcatggtggaaacgcccggcatgattgcctttgctccgcccgaataaccggcaaaaaaatggtattcaatattgcccagacatattctcaggtcagcatgcgccaccttatccgctatgtccaccggtgtgccggcctttgtctctcccatatgaataaagctgcattcggacgagtccatgcatctgcaagtattatatacttcgtcccccgccagatgccgcatctcctctgacgtatgtctcctgtgggtccccatggcaaacaccacagtgatatgggagcggctgactccggccttttccagccgtttcaacacatggggaagcaccctccaggaaggcatgggacgggtgatgtcacttgtaatgatgaccacatcctttttccctgatgccatcttttcaagccgttctgtgcctatgggggaatccagagccctctcaataatctcttcctccggcgctctcatctcttttttatggggagtcaggatatgggcaatggcgtctctggggatttttaccttttccgtgcctgtaccataaccaagctctatctcctccacagccctgtgccgcagctcatacacatcgtttagctttaccatccctgttacctccgtatcctgtatacttcttctgcggacctcccactggctgtaagccagcataaaggcagccgcgcccttttgctcatctgagacaactgcttctcccagataataagaaacacttccatcccgttccggccggtcagccggtcccaggcctgcgcctgcgcaggttccctccaggtggaggcatccgtttctgagcttcagcttctctgtctccagagccatcatgataaggtccgcccgctggactgtctgcctgttaaatattcccatctcatatcccttataaatggaatacgctgccatggccgaggcagacgtctccagataattgcccggtgtctttcccagggccgtcagctggaaaaacagaccgctttcctggtcctgataccggagcattccctccatggcttccttccacaaaccggccaggtactgccagtcctctgacccccttggcaatatggaacagcagtctgccagtgccatcagataccagccctctgcccttgaccagaaattcggggaacgccccgtctcagggtcggcccagaactggcattttccctcatcatatgcgtggatatacaggctggctgactcatcgtacaggaaccgcctggcgttttcaaactgctttatgatgtctgcgcagttctttctatcccccagctccatctcatactgaaggtaaaagggcgccgccatataaaggccgtccagccatatctggcggggatatatcttcttatgccagaaacttccggattctgtcctgggctgacgccgcaattgctccataagctgctttgctgccagccggtacttctcctgccctgtctctcgatacagaaagagcaggccgcggccggacggaatcttgtccagactgtactcctcccggtcataccaccgtatcctgccgtcagggcatatgtaccggtccagaaacacccttaccgcctctgcatagcgtttcctgcctgtggccttatacatggcctccaggccagtgaggacacagccgtcctcatagttccagaacttcctgtccagtttcatgaactcttctgcatactgactgatataccgttcagctgtcatggccctcctcttttatccgcttgataaacaatggcttgatgcctcctgcttccagaatggacatggcgtattccccgattgtttcacactggtgctgttcccctgtatccagattcttaagtacccctgccgtcatattgatttccaggttctggccgctctccacctttcctccgatacccttgcacaccagcagcggaaggcccagattgatggcgttgcggtaaaaaatccttgcaaaggattcggccaccaccgcccctgctcccatgttaagcagggcaatggctgcatgctccctgctggatccgcacccgaaattagtgcccgccacaatgattcctccctttggaaaatttcgggcaatcccctcatccacgcctgccaggcagtggctgccgatttcctccggattggtaagggccaggtaacggccaggataaatctggtccgtatcaatgttatttcccagggccagggcctggcctgcaaatttttccttcattttctcactcccctttcccggttgcttctgtttcccgtctctctgcctgcccctgattttcccaggacggatcggtcagatatccggtcagcgcagacatggccacggtagctggcgacgccagatatacggcggaatccctgctccccatcctgcccggaaaattccggttggaggtggtaacgcacacctctcccgcggccaggactccctggtgggcgctgagacagggaccgcatccaggcgcggatatggtggctcccgcgtctatgagggtggccaggaagccctttgcaatacattctttaagtacttcagcggatgccggaatcacaaccatacggacatggggggcaattgtgcgccccttcagtatgcgggcagcctctcctatatcctccacacgtccgccggtacatgctcccacaaatgcctggtcaatgcggaccctgcccgccagggccaccgcacccacattatccacgctggagggcatggaaacctgggacttcagtccgcttatatcaaagacataggtttcctcatattcaaaatcaccgtccgtctgctccaccgtaaacgggcggctggtccggcctgccacatagtccaaaaccgcctggttgggctccatgtaagctgtctttgcccccatttcaaccgccatgttgcagagcaccatgcgcccagccacatccagctcttccacataggagccggtgaactcgatagccttatacactgccccatccgccttcattttccctatgatatacaaaatcacgtcctttggaagcacatgtcttcccggcatgccttccaggtgtatccgtatgatttccggcaccctgaaccagagttttccggttatcaggaccgtggccatatccgtggccccaatgcctgttcccaggcatccgaacgcgccgtgggtggtggtatgggaatcggttgccaccagaatcatgccgggatacaccaggcccgcctcaggcataacctgatggcagatacccgcgttgatgtcaaaatgatgggtaagtccctgctcctgcctgaacaggcgcatctccctgtggttgcgggacgcctcaatggtgggggagggcgcatagtggtcaaacacaaaggccgccttgtccctgtcccataccttctcgcctcccatctcccggaaggaatagatggtctggagatacaggtcgttaatctccgcaaaatcaatgtcggccgttatgatttccccgctgaccacccggtcgcggccgctgtgctttgccaatatcttctctatcgcatgcatatccttttctcctgtcctgcttttttctcctgtcctgcttatatgattctgaatctgtccaacacactgtagtcaggctcaaagccgattcccggacgttccggggccggcagcctcccctccctgtcaatctccagggagtcattgaacgcattttgccacacctcatcgtatgccggaggataatactcaatataggacacattgcccactgccgctcccagggaaacattgatggtctggtccccatggggcgccagctccagacagtgggcctgggacagggctgctgtctttaagaactccgtgacgccgcccatgaggaaaggcgccgggtttaagattggaacagctccggtgtcaatcagctccttaaagccccatttggtatactcattctccccggccgccaggggaatcactgtcttgtccgccagccttttcatcccgccgtaatcatggggcgccaccggttcctccagacagtagatatcgtattcctccaccagcccggcaaactggactgccctgtggctggaatacgcacagttggcatccagcatgagcagggcccgggggcctatggcttcccgcacagcctttaccctggcagcatcttcacggatgctcagggcacccaccttcatcttgacgcctgagaccccctgttccatataaccctccatctctctctggagatccgcgattccttttccaggttcataatatccgccggcaatataaacaggcacgctccttctgtattcccccaagagccggtacagcggcagtcccagggacttggccttgatatcccaaagggccatgtcaataccgctgatcgttctggtgctgattcccttgcgccctgtaagcttaggcacatagagtctgtcccaaagccactccgtgcgcataggatcctgtccaatcaaccggtctttcagctcatccaccatcatgaaaggatttatgcccagtaccggaccggaaaggccgtatcctgtaatttcctggtctgtctccactgtgataaccgccaggccgcagtgggtgtaggtatgcattccgttggtgatgggacggcttttctcccatctgaaatattcctgtcttacatctgttatcttcatatgatgtcctttacaaaagggaatgccgcaaaatgcatctccccattctgcggcatctctctcctgttccttcctgcccttactgggcagttgctgtctctatttcccggttgattccgtcaatcagcatatccgcacaggcagcagcgtcctcttccccatagctcaaagactggattgcaagggtatacacaccgtcaggcgcctttaatgcagcccgctctgtgaatatatccagcttgaaggcagaccatgccatcagtttctcattcatttcagccaccaggcttccctcagtctcaacatatttaaccgcatttttgttgcacgggatgccgcggctgtctccaaggataacagctccttcttcgtccccaaacaggaactgtatcagggcagcagcttccaccggatgctcagaagtggaagtgattgcaataacctgcgatgccttaatgggaccgccatggtattcgcccatattaatcatatcgcccaccacaatttcgccgtcagtgaccgcatccacatacttggcaatattggtatcccagcacatggcgccgccgtaatggccgttaatccagctctcgcttgtctccaaaagttcagaggtgccttcccctgccagcttctcggaatcagggatgatgtgcctgtcttccagctccttgatgaagttcagtccttctgcgatttcttctttggagtactgaagcgcattgtccttaatccaatccctgccgtatttacactggagataataaatcatgagatgcacctttacataatccgcacaggcaaagggatagtaggatccatcctcataagccgcgaatttctcccccgcctcatacagctcgtccagggtagtgggtatctttgcccctaccttatcataggttgtcttattccatataaaaccgcggcccgtattggcgatagggagggcctgcagggctccgttcaccgtataaaaggccttgtcggaatcatcataattagacaggtcaatgatattggaaaccttgttcagatcataaaaggtatctccgttgggtgagtaagcaaaaacccagtccatgttcagctgcaccacatctgccgcggatcccgcattaagggccagggatatcttctcctcatggccgttaaaagcctcgtactccgcctccacggttatgttgggatatttggcctcaaatgcctcgatggccttaagtgtcttttcatggcgggaatcccctccccaccagttaaaacgcagggtgattgggtctgtggtgtttacctccatgtcagcagaagctgccgcctctgtgtctgccccggctgcctccgggtctgctccggctgcgttttccgccgcctttgtatcctgggtcttagccggagcggctgcggtctcctttgactgtgtgggcatacatcccgccagggaccctgccagggcacccgccagaatcagactaaccagttgttttcctcgttttctcatgtgtaacctcccattataattttatttatttttctttacccctttactccgcctgctgcaattccgtctacaaacgaatcctgcgccataaaaaatacggccagggacgggataattgccagcagcgacattgccagtatccggttccagtcaaatcccgtctctgtatccatggacattctcaaaaatatggataccggatatttgcgcactgaattaatataaatcaacggccccatgaaatcgttggaggcccacataaactggaacagggcacatgaaacgatagacggcttcagcatgggaacaatcacgtaccacagtctctcaaccacattacatccgtcaatctccgcagcttcttccagttccctgggaatcccccttaaaaactgtatcagcatatatacaaagaacgtatcccctgccagcatggaaggaatcacaatcggcagataggaattcagccatcccacctcgttaaacaggatgtactgaggtacatttaagaccacctgtggcagaaacagtgtggagagcagcagcacgaagagcaggttcttgcccacaaaccggaacctggcaaatccataggatgtaattaccgcggatataacggtgaacaccactttcggcagtacaaacttgtatgtattccccataaaatgcagcaggttcatgccctcgtaacccttaaatccatttctgtatccgtccagagtaggcgccatgggaatgattcccgcactggaaaacagctctgaatttgtcttaaaggacgctcctatcatccagcacaggggatatatcatcacaattcccaggccaatcagcaggagataccgcaaaaacaggttaagacgtgctttttcttttctgttcatatgcctacctcccatcctcatctgcatagtaaacccaatacttctggctgataaaagccaccgccgtaaaggtcatgattaccaggaaaagcagccatgcaatagcgctggccagccccatctcattccgcttaaaggcttcgttatagaccagaagcgataccagggtggtggagcgcagcggacctccctgggtcacgatgaagggaccattgaattcctgaaatttatgacacagctgggtcacgaagttataaaaaataacaggtgtgattaacggaaccgtgatttgaaagaactgcttccattttcccgctccgtcaatggccgctgcctcgtaaagatctccctgcacccctttcagggccgccaaaaagatgaccatgggagaaccaaactgccacaccctcagaagcacgattacaaagaacgccccgtcgggattacccagccagttaaaggccggaatacccagcgccccaagcatgatgtttacaaggccctctgtcttgaacaaaaacttccacaggaccgcaatggacactgaccctcccagtatggagggaatgtaataaatggtcctgaaaaaattgagtccccgtatcttattgttgagtatgtaggcaataaacagggcgaacataagctccagcggcacggttaaaaacgcgtacttaaaggtctgtatgaatgccttgataatcagcttatctccaaggatgtacttgtaattttccagcccggtaaaggaggctgtcttgaacaaattgtaggaatggaagctgtaaataaaggaggccgcaaagggatacagcttaaataccaacagtccaatcagccagggcatgacaaatgccagtcctatattgcgtttccagaatcccttcttcttttttttcattcttatcccccatacgtttatttccatccggccggaaggtaacgttctgtattacgaatcatgtcatctgccagtttccttatctccctctcatcccggcatttgtgcttcaccagcggatcgttcataaatgccttcaccaccagattccggtcatatgtatctgctgcctccagtatgtatccgtgattctgtacatgtggaagtatcaattccctgattggttccggcaggggaccggctgccactgccctgatgctgtcacgggagaatactgcatttgtctccaccacagcctcctttggaagattgggaatctgcaggaagctgtttggcatattgacattgctcaccatccggtccagacccaccagagcctttatctgctgtaccccctcctcaccggacggaacaatctccatctgctcctctccttgaatcaggcgctttctcctggccaggcgttcctccatctgactgattctaaagtccactgtggtcagcccgaacttccatgacctgactgtctccgggtcattgagataggtgtttcccggcatgaactctgccagatgccggtctcctgcggcagcgatcagtccataacggttaaacaaatcaaatttcaccctgtgccggcagttaaaggtggatttttcccatagacggtcagggtcgtcgtaaccctcctcaaaatgtgtcccaatgtacttcttatagacagggaacaggtccgcgccttcataggaagcagcgtcaaaccaggtaaaatggttgactcccaatacatttacatgaatatccttacggtcaatggggcctgtccccagctcctgtgaagcaatggcggccagcaccttctgtgtgccgaacacctcatggcagcagccaaaggccttgatttcaggaaatgtcttatagagactggccacgcacaggctcatgggattggtatagctgatgacccatgcaaagggacaaaactctctgatagccagcgcaatctcctcatacatgggcagggtgcgaagggcgcggaccataccgcccggacccgccgtatcccccaccgactggtagatgcccagccgttccggcaggtgtacatcggaacgcatttcctcaaaggtccccggcagaatggagattaccacaaagtcagcgccctttaacgcctcctttaaggaatatgccaccttataatcccaccggcctgcggcctcttttctctccttaagctggctgccgatgatctggttctcctcagctgccctggcatctatatcatagagccagaccgtcccgtccagcgcaggctccagggccaaatccgccatcagtttccacgcccatgccttggatccccctcctatgtaagccatcttgatatctgatacatgatgattgttccacttcattcccatatcctcctcgttatgagcacttggcgtctgtctttcagacgcttacgtgcgatacatgccgcctcctctgaatatcgtatatcgtatacgatttactgtagttttatcatactttcgatgaaatttcaattacttttgtatattatttttatattttggctaatatcactaatttttatgtgcactttttcatttaccaacgcaactaagttttgactcttttgggtttgtatgctaaaatagctttattctaagaaaagcgggtgaaacaaatgaaaaagctggattcgctggaaataatgcccacgcgcatccgaatcgcttccattcttcgcaaggcgattctgtcaggcgagtttaaagaaggggaagaattgtcccttacagacatagccaataacctgggtgtcagcaggacgccggtccgtgaagcatttcagattctctcctccgaaaatctgattctgctgagaatgaataaaggggcgattgtaaaaggaatcaccaccaaaacaatccgtgagcattttgagatgagatcattattagaaggggaggccgctgtcagggccaccctgagacattttgacgtatcggaactgatggaatcccaggtccacatcgaaagcctgggagaaaatttcacagatgacgagtatcagtcctataaccagaatctccatacctccatatggaaggctgccgacaacagtaagatgtattccaccctctcctcactgtggaatggaagttcctttggaaaaaccgtttcagccaaggaccatcagattctctccatcagggaacacaggaacatcctggaatacatccagtcctgcaatccctatctggtgcgaaaggaaatggagcaccacattgaacgaagcatgaacaatatcattgacagcttctccttaaaggaaaacgagtaagaaaacgtacgctctctggcgcacaaaaaaccgggccgcagcatctgctgcggacccggttctttatatgtagaaatcaaggaaagtgtatctgatatctgactatgctgcaaatggagcgatttcctccatcagctggtcacagtcatctgtgtgaagaatcagttctacggttttggactttgccagtgataatacacctacaatagactttgcatcaaccatacggctgccgcatttcacatctgcatcgcactcaaaacggttcatgattcttacaaaattgataatctggtctgcctggtcaaacttaacaaggatacgtttcatgttgttcacctccgtatggtattttatttagtatcactgtcagatacttgggggatggtacttactggtaagtccgcatctgacaatgcctgctaacgttatcttttgtttgtcttccgacatatttataataccacgttcaggtactggatttccatggtaatatttttctatctcatggaatattttcaaatattatccttatatcatctaaatctggtccttccagtaaccaatattttccgaatccacctttatgggctctccggctatgacctccagcccgccgtcatgaccgtaatccatggggtatgtcctgcctcccagaagcagctcctggtcccccctctcctcaatacgtccctcagacagctccaggcacacataccctgccacccttcccaggtccatggggttccatatgtaaagtaccgggcagatatcctcaggatcgctgcccacatagtcctccatctggtccggaagtcccaggccgatgacctttacctttgaggcctggccccgcgccttcaccacatcagccgctgccttgattccttccgtggacaggcagcacattaccttcaggtcaggataagtctccagcatcagatttgccttctcagccgccttttcatattccccttccccgtaggcaatgtccaccagacgcaggtcacggtactccaggttctgcagttcctgcttcatcatgtatatccactcgttttgattggcggaacggcttcccgccgacaggattccccactggccgctgtgaccgcatatacggtccacctccctgaccagttccttgcccagctccctggcatccaccgggcttatgtaaatactgcggcttcccgcctccacatccgcatccagggtgatgacggagattcccttttccctggcctgggtcaggaccggagtcagggcatattcatcgttggcagccacggcaatggcctccaccttctcgtcgataaggttctgtatcagatgtatctgctcctgggcagaggggtggtcggggtacagcacaatacagttcttgccggcatcctccaccgtctgtttaaacccttcgctggccagctcattgtaccagttgtttctggatttcatgataatggcgtattttcccctgttaaactggctgctctggcaggaaaacaggaacaacacgcctgtcatcatgaccgcccccgctatccaagcccaattttttcctttcaccctgccgttcccgccttcctgctgttttttcccagtatatacctaatgtcgtattttgtccatttccgttgcaaatttatgatttcttgatacaatagttgtatcggtattgattattgtatacaaatcactgccttttagaaaaggatggatgatgatagatgaaacttctgattgttgatgatgaaaaactgacccgtgagggaatccgggacagcctgggcctggagagccttggcatcagccaggtactgttagaggacgacggcatacacggccttaaaaccgcccttgaggagcgcccggatattgtgctcacagacgtccggatgcccaggatgaacggggtccagatggcggagcggattttaaaggagctgcccgggaccagtatcatctttatgagcgcttattccgacaaggaatacctgaaagccgctatcaaactgaaggctttgggatatgtggaaaaaccccttgacatggaggaactggcctcagccgtaaaggaggcagtggacagcagcaggaacgagaaaataagccaggcagcagcaaggcttcaggaaaaggaacagctgggccatctgagcctcctgctgtcccagccagaggaggaaagtcttataaaggcaggacagctggcggcggacctggggctttctatcacccataccacctgcttctgctgcattatcattgactgtgtcactcccttatccgcactgccggaggaacagatggacggaatcagggattattttatggagtatctcacatccatggacatatcccaggcctatgtgctgaggggggaccaccgcattattgttttcctccactccccggtgcgtcccgcggacaagaccctgtacgactgcgccggtctcctggcccaaaagcttattaagatatgtccctttttcatttctcttggcccggttgtaagcggaatggaccgcgcgcatctatcttaccaggaagccagcgaacatctgaaggaggcatttttccacgactacggattcatactgacccgcaatatggaaacagctgttttccggccgccggcagatctccttctggaattttccatggccctgtccgaaaagcaggaggaggaagccctggacatcgtcaggcggctgtacgaatcctttgtgccaaacgacatgattggccccagccaggtaaaggatatctattacaagtatttcagcaagctggacgaacacggcctgggaagctatatttccctgtggcagaaggaaggactggagtctgaatccatctgggaaggggttatgaactgcaccatcctgagggagctcaacgaccttctggcggcaaaggtgcgcctgttctttgagcgccttcgtggaaacagcgtgggaaatccggtggtattccagataaaggaatacatccataagaactatgcggtcccgtccctttccgtgcccgatgtcagcgaatacgtccgcctttcatccagctacgtatgtactatttttaaaaatgagacaggacagaccttaaaccagtacctgacggattaccgcatcaagatgtccaagcagttcttaagcgatcccagatacaagattgccgatatttcctccaaggtaggatacagcgacggcaattactacagcaagacctttaagaaaatcgtgggcctgtccccttctgaatacagggagaaaatgcttgcatgaaaaacccgttcacaaagctgattcaccattatacctatgacatgcgcctgaaaacaaagcttgtcatatcgcacatcatcctggttctgctgcccaccgccgtactgtcaggctttctttacctgcgcatttacggcattgttatggatgacagcatccgctcggagcaggctttgtccgcacagaccgtgacctccatcgagagtctcgtttcccatgtggggcacgcctctgacaccatcaccggctccatgatggtacaggatctgttccgggtacccagatcagaggccagtacccgggatatctccacctccaagatgaacagcctgttccacctggtgcagagcattacggaccattccatgattatggatgtgaagatttattatgatgacagcgtgtacggggacctgatgcagtacaacaagatagggaatgccctgtttaacccggtttcttccgtcagcagcagctactggtacggcattttcagcacctcacagcagtcgcgcctgctgtgcccggaattgtacctgacaccggacgagacgggaaagagcggaaagctggcctatattacccgaatcccttatacctatgaaggcggtactgtgtccgacattgaaaatgcctccgcctatgtggccctgtatctgtccggacctgcctttgagacggtgctgcgcaacgacgccacggtcacggatgaggctgcctttctggttaatgagcgggatgtaattgtgtctgcctcagatatgggcctggccgggaaatacttcattccccgccgtgatttggagcagcgggtgggaaaggaaaagaccttttcccttgtttcctatctggacggctctgcctatgtcgcctattttcccatcgcggacacggactggtacatgatgtccattattcctgccctccatatcggagacgccggaaaggcgctgatgacgcattttgccatgatttacctgctgttcaccgccctggccctgtacactgccttccgactgtcgggttccattgcggaccgcatcataggcgtggccctgcagatggagacggtgcgcacaggcccgccccagcccatggatgtggctgacacgggctgcgacgaaattggtgtgctctccgatacctacaactacatgacagaagaaatcatcaccttaatggacagccagaaaaaggcttcggatgagcttcggatggcggaattccgcgcccttcaggcccagattaatccccattttctctataataccctggatatgattaactggctgtcccagaccgggcagagcgagaaagtaacggaagcagtccagatcctgtcccgtttttataaactgactctgagccgcagggagctgatgaactccattgagaaggagctggagcatgtaagcctttatgtgcgtctccagaacatgcggtatgacaattgtgtggcctttgtggtggatgttccggaagaactgtgcgagtacacaatccccaagctgacgttccagcccattgtggaaaatgcctttctccacggaatcatgatgaaggaagaaaaaaaaggcagtatcctgctaaccggctggccagagggagatgatattgtattcatcatctctgacgacggggcaggcataccgcctgaaacgcttgatactttaaaggatgatgtgaatgccggcaccggctcctccgccagccccaggcacaccgccttttccggccatatcggcatctacaataccaacttaaggctgaagagcctgtacggcgaatcctacggcctctccatcaccagcaccctgggcaaaggcacggaggttaccgttcggatccctgccagacatatcacgtctgactgattcctttcacatcccagcaatatgattcataggccgctgtcaggttcatggcagcggtctcttttgctgcctttttctgcagataggatgcctggccctccaggtactgcgtgcctgtcagcagtccggcctgctgctttctctggagtccttcgtaggtcagctgggcgctctgaaaggcagtgagggccgcctcataggctgtcttgctggcctggaggttctggtaggaagccaaaaacgctgcctcctttgtcccctccgcctcatccaccagcttgaatctgatatttatttcagtggtactgctggctgaggtgtggcgggcattctgcacgctcttgtcatttcccatggccctgatcttatcgctctcatagtccacggcttcaatggcggccatatccggctccggtacggttcctatgaccacctggctgctgtcctcaatccccagcatggtaagaagctgctgccgcagctgactggcctggagcctgagggattccagcgaatttttggcagtgtccaggtttttttgcgcttccttcagctgggcctgggtggcggaaccggctgcctgctttctccccatggcctcaaaggcggcctgtaaggactcaacccgcttttcctggtattccacgttctgcaccatctggttgtaggaattcatcagtgtctgggctgtcatggtaaaggtatccgcggatttttccaggctgcgggtgctcttttcactggtcatggtatccagctggctgtatatacggctggctgaggattttaacatggcggcattggaggcatagattccggctgtctggctgtcctcatcgtccatgtcctccgccttatcctccatgttgtcctgctcccgcttaagagtgtcccatatttcctggtaggcgtttatattgtcctcataatcctctatgctctcttttaaagacaggttcccctgtttcagcagttccctcagattgccgtattcaatgattatggcacccgctgtattccctgcggtttccggggtggtgctggctgctccggcctgggatatatccttagatatgtcctgagatgtgtcctgagctgcataggaagtccggccgccggctccccacaggcacagtaccattgccagaagaactattttaaccttttgggtgtttcctgtctgcgtgtttcccgtttctgtatttcccgttattatgtcccccctgttcctgccgctctcctttatatcactgcggtttctcatttctgtcccacctcgtttcgttctgccatttcctgtgctttacacggttctattccgtctcccatatgctcacatcctatgacacagacgccagtccgtccaccgaccaacggtattccaactgggccttaagcagggccagcttctgtgtgcgcacattgacctgggccgcggcaaaggcggtctgctgtgttacataatcgttccttgtcgtggttccggctgccattttccgctccgccgtctccatggctgccgcctcgatttcatacgtattaagggcctgctcatagtcggatttggatatcatcatgctctcgtatgcattctttatgctggaagcagctgtctccttctggctctttaagctctgttccagactggttttgttggtgccgctttttgcattggctattttcttttcaagtattttaaggctgtagttattttccactcccctggatacatcttcctccaggttaatggctgtcatcccctccaggtccggctccggcacatcccctatatccacctgcgccccgtaggtccatcccagcataaggcagagagtttcttttgtctgccccagactgctctgggccgacagcagggatgcatctgccgatgtgacggcctcctgggccgacagcacctgagcctgggtagacatacccgcactcaggcggttaagcgtctggtcataggaggaccgggcctgtatcttattctgttccaggctctccagactgtatgtctggctccagtagcttatcatcagctcctgggcctccttcaccagacctgcttctgtcttgtcatattccagctttttgacgtccccgtcctccacattgtcgtctccctgctcccgcagattatctgcctgaatctggctgctcagataggaggaaaggcggctggcataatctgaatccgacgaatcaggatattccaggcttccgtatatatcatcggcggcatcatagtaatcatccgcgatatcgtccgcgtcctcgccccggaaatcctcatactccagctggttctggatcaccgtgttattgtatacatgaatcaaatccgctatctctgtgaattccagctgattatccctgagggaagcccactgttctgcggtataggcaaactccggggtgccggcccatgccgtcaccggcatggtgccaaggcacaataccactgccaggcatcctgcccctatttttccatatttcatatgattgacacctctttcttaaatatccagtacaacccgtttcttatcaccgttcataagcgcatagtagattggcagtatgaacagagccaccgccacgcccacgctgagtccgccgatgttaacaatggccagaccctgggtggtggaaccgctgtcccctatggccagggccatgggaatcatggaaaggatggtggtaaggctggtcatcataatgggccttaaacgtgtggcgccggcctcaatgagggctgtctttaaatccatggtcatgcggtattggttcactgtatccacatagaggataccattgttaacaacagtgccgaccagaatcaggaagcccaggatagacgtcatactgatgctgacccccgtaatctgcaaaagcccgaaggagccaatgaggctgaatggtatggtagtcattaccatgaaggaaaacttcggtgactcaaactgcgctgacagtaccacaaataccaggaacacagcaacggcaatcgcctggtacaaggctgcaaattcctcctgcatcattcggttcatggagttgacgccccttttgatggtgccgcttaagttggggtttatgacctcgctgtctatggcggactggacatttccccctgtataatctgctgtaatggttatctcatatgccttatccgtcttggaaatggaagccgggctgtccttataatagatttccgccacatccgtcagggccacatagcctccggaaggcttggagagtataatatccttcatctggctgaccgtgcggtactcatcctccgggtactcagccatcacgctgacctccctaccgtccacatccagggtggtcacctcttcgccgtccatcatctgctttacctgggaaccaatctgggatgcagtaagcccctccgctgccgccagtaccgggtccaccttcacggtaaccacaggcgctgtattttctatgctggaatggacgttcatcacatcgtccctggccgtcatctcggcaacaatcttgttgctgacttcctggagctcgtcgtaatctgttccgttaaggatgacttcatatccccggttcctgctcatgaagctcatggacgaggatgcctccactgtcaccgtacagttatccagatccgccatctctgtctcccactgctccactacctcgtcggtgctcatatccctgttgtccctcagataggctgttatggtaccgctgtcattgttataacgcagcatgtaggattccacatccggatgcccctggacaatctcctctgcctgcagcagcatggcgtcggcattttccgacagcagccccggccttgtttcgatggaaacactgaccgttcccgtatcgtccgctgtcataagctcggtttccatcccgctggccagaaaataggctgcaatcaccaggattacagatgcaatcatgataatggccttgtggtttaaaagtccgggcatgatgcggcggtatccgttctgtatccgctccatgggccgcgacatcggcgcctgcatcctctcctggggcttatacgccatatatgtaaggggaacaatggtaatagccgacaaaaaggaggcgagcatacagaacacgataacgtatcccatggagccgaacatctgtcccgacataccctgcagaaataccagcggcaggaaaaccacgcaggtagtcaccgtggagcccaaaatggactgcagcacaatgtttgtacctgacagggaagccctggcatatcccagaaggcccttgtcctcctctgtctcgatggccctgaaacagctctccagcaccacgatggagttatccaccatcatgcccacgcccagcaccagaccgctcatggtaatgatgttcagagaaaaaccggcgctggtcatcagaatcagggacaccaggatagaggtaggtatggagcttcctacaatcagggacgccttatagtccccaaagaaaatgaatatgataatcatggaaatcacggctgccagcaccagggtaagggccacatccttaagggagctgagaatgctgtccgcgctgtccctgacaatcctgatattcaggttctcgtcgtccgcctccaggctttcgataacctcctggacctcggatgacacatccatggccgtgctgctctgctgcttggtgatggaaatggaaatagtgtcctggccgttgtagcgcgagatacctccccggctctcctctgcctcataaaccttggcaatgtcctccagatacacaatttttccgctggaggtggtgatggggacttccttcagagcttctatggtctcatgctccagggacgttgaaacagaaagctccagttttccggatacagcatcgccggatgggtaggaaagatttgccgtgctcatggcagtggacacgtcgctcatggtcacctgatactgggccatctcatcggattgaagctcaattttataatattccgacttaccgcccatggcctccacctctgccacagaggaaatctgttccagcaaaggcaccacggtctggtccacataatcgtacaaatcctcctgggaaggatttgatatggaaagcatcatggtggttcccgcattgttattcatctccatgacagaggtctccgcgtcgtcagggagctggcggctcaatgcatccagactctgggataaatcattatatgcgtcatccatatcggtgccgtaatcatattccagcataatcatggccctgttttcgctggaagtggagctcatgcttttcacgccctctatggtccccacctggtcttctatgggctgggtcacaagttcatctatatcctcaggaccagccccggaataagacgctatgataatcagcatgggctgatccgtgtccggcatctgttccagcgtggcattaaaaacggaagaaataccgaataccagaaggcaaagcaatgccataaccgtggccaccggacgttttaatacaaaccttgtcaatcccatgggttatgcctcctgttccgcctgtgatgctgcatgtttgctgtcttccccgccgggtgctgctgtttctccggcctgtgtttcctcctcggactggttcccttctccggactggaactcttctctggactggaactcttctctggactggaactcttctccggactgggttttctctctggcctgtgtttcttctctaaactgtgcctcttctcctggctgcacctcatccctcaaccgtattttcgccccctcatacaggttggagctccatgtgctcacaaccatgtcatcggctgacaggccggaaagaatctgggcatgttcctcgtcctccagtcccacttccacctgggccatggatgcggtgccgtcctggtacagataaacataggcattgcccccgctgtaatagatggcatcaatgggaaccaccattgtatccagtgcccgttctgtcacaagatttaatttcaccgtgcttccggctgcaatctcctgtgtgttttcaatctgggcctttaccttgaacagccctgtatccctgtcaaccatggagtttatttcgctgatatatgccttgtatgtagttccgttcttctggatttccagctcatcgcccacattggcgttctgcatcatgcgctgggtcacatagaaggagactatgttctctccctcgccggcaatcacgcacaaatcctgggactggctcaccctgtcatacacctccacgtcaaagctttcaatcttcccattgataggagcggtgacggaactgtactgcacctgtctttcgtaagccagtttagcggactcatactggagctgcgcggacttcaccgcattgacatactgctcgtattcctgctcggacaaatcgccgccgctgtaaagaatctgcattcttctcaggttgctctgggcctctgaaagagatacagatgcagcatccatggagttctttgccgtctccacctgctctgtatcaatctcaaacaggacctggccctgtgtcaccatgtcccctgccttcacatataccgccgtgacgtcacctgctgcctttgcatagatatgaaccacatcagaaggctccactgtgccggtaagccctgtggtaaggataatatcgccggaggacggctgttctgccctcaccactgtgacagaagcctcctgtcccataggcatgccgccctttgctttttttcctcccttcattacaatcatagccacagccagtatgacaatgattccggctgcaatgcctatctttattttcctgctcttgctcatatccaatctcctttgctggtttactcaactgattcctaatattaaaggttgaagattaattcaacattaacaaaacaggtatgaatgtcatttatttcacgtgattctgtgaattttttgtgactttacctgatgtctgatgcagcagcataagctgtccgaaaacagaactaaaagacaggcaggtacacacatacggtacctgcctgtcttttagttctgtttggacttgcgatggaggcgatgacagccaatgtgaattaaacggctccattgacaccggcatccctcttaagcattttttcataagcatatttgacactgttatcaaaccatatggttccgcagtagtcaaaaccgttcttttccaagacatgcctcataatagcatttttctcatcggtgtcaacccgaacgctgtaaattccattttgaatacacagctcttcaatgagctgaaacgcaatacttgctataccatgcccacggtaagccccggatattgccatacggtggactaccgcatagggaagatcgcttttccagctgccctgcagcgtttcataggacgcctcacccgcaaaatcaatgcagaggtatgccgcagcgttagaaccctcctcgataaaatatccccgcccatgctccaggtccccgatgatggtttccatatccgggtatccggtctgccactggtcaatgccctgcgattttaagaactctttggcttcatcgatcaacgccattgctttctctgcttctttcctatttgctggctgtaaaataaatcgttccatacgttgtacctccgtcattttatttttgactctcctgaattttcattccgcaaaaccatgtggcaaggaaaccagctttgacaaatcgaacttgccctccttcctcttgtctgttataataacacaaaacaatgcagcgaacaaatcaaagtatttatatatatagttcaattttttcgaagtattggaggaaaacccatggatcttaaatgtttaagaacattccgcacgattattgatgaaggcggtttttccaaagctgccaaaaagctgaattatacacagtctaccattacgtttcaaatgaatcagcttgaacgcgacttatccactactttatttgaaaaaatcggcaggaaaatggttttgacaaaagcaggagagcatctgattccttatgtggatgacattctccagtccgtggacaagttatcttttttaggcgaacatttatcggaatgccagggagatatccagatcggcgttggcgaaagtctgctatgttacaaacttcccgctattttgaaggaatttcacaggcaggctccgaaagcccgtttgttcctgcgctctatgaactgttatgatattcgggatgagcttttcagcggcggattggatttaggcgtattttatgaggatgtgggaggttttggctcgaatcttgcggttaagcctttaggtgattatcccgtggttttggtggcgtcccccgaaatacaaaacagatacccggattttgtgacaccggacagaaccattccgctccctctcatcatcaatgaaccgaactgcattttccggcagatttttgaacaatatcttcgtgataaatcaattattctcgaccataccattgagctgtggagcattcccacaatcaaaaatcttgttaaaaacaatgtgggggtttcctttcttcccgaatttacagtaacagaggaattaaaccatggtgaattggtgaaaattccaaccgctatttcaggcacaaaaatcactgccgtctgcgcgcaccataaaaacaagtgggtcagtccgctcatgcagctgtttatcagtttatgtgattcggtttcctgcggcagggagcggtaaccggcctctctgcgtctggtatcgcgattgtaaaacataaacatcctaaataaaaaaataaatattctttcattttctgatgattcgtttatgtttactttataaaaagatgttatatatgtataatgaaatgtagcagagggaggtaatggaacatgtttcagatactggttgcggaagatgacaagaatacccggcggctgatggaagctgtactgaaggaacacggctaccatcccatcctggcatgcgacggcctggaggccttgaaattattagatacccaccatgtagacctggttatcctggacatcatgatgcccggcatggacggctatgagttcaccagacagctgagggctacagattacaccctgcccattctcatggtcaccgccaaacagctgccggaggacaaacggaagggattcattgttggaacagatgattatatgacaaagcccgtggatgaggaggagatgattctgcgcatccgggcccttctgcgcagggcacagattgtgaacgaacggcgcatcaccatcgcagatgtgtgcctggattacgactccctgaccgtaagccgaggggatgaaagccagacgctgccccgcaaggagttctatcttctttacaagctcctgtcctatcccggcaagatattcacccgtatccagctcatggatgagatatggggcatggaatcccagtcggacgacaataccatcaatgtacacattaaccggcttcgcaagcgttttgaggattatcccgagtttaccattgaaaccatacgcggcctgggctacaaggcggtgaaacatctatgagacacaggagaaaccgtaaaccactgggtaccatgaccctcatactgaccgcaggtatcttcttaatcatgctcacggtcatgaccctgcagggatttttgatgtacctgtactggaggattttctaccaggctgatattcccatcccccagttctggcgccccattcccctgctggccgtgctcagcgccgtggttggcgccggcctcaccctgctcttaagccgcatcccccttaagcccatccgcgacctgattgaggccatcaaccagctggcggacggcaacttcaaggtgcgcatccacctggacctgaaccgtgaatttgaacgcctctccgaaagctttaaccgcatggcccaggaactggagaacacggagctgctgcgctctgacttcatcaataatttttcccatgaattcaagactcccattgtatccctgagaggctttgccaagatactgaaaaatgacagactcacaaaggaggaacgggacgaatatctggatatcatcataagtgaatccaaccgcctgtcccagctctccaccaatgtgctgaatctgtccaagatagaaaaaatgagcatcctgtccgatatggaatcttttgacctgtcggaagaagtgcgccagtctgtcctgctgctggaatcaaaatggcagaaaaaggacctggaactgtttattgatatggatgaactggaataccgcggaaataaggcgctcctaaaccaggtatggattaacctgattgacaacgccatcaaattttcccctcagaacggaaagataaaactgaagctgcacaggaagaaagaccaggtggttttccagattctggacaatggatgcggcatggatgaggagacaaagaaccatatatttgaccgtttctaccagggagacagctcccatacggcagagggaaacggcattggcctcacggtggtggaaaaaatcgtacacctccacaaaggtcagatccgagtcgtcagcgaggccggtatcggtaccacctttacggtgaaccttcctattatcccaccgccttcggttctgtaagtttctgtgaattcttccggcgatttttccggtgattttctatgtgaatttccccggcgtgtatttcgccatgaattctgccatgagtttccccggtaaaatttctttgacataccgcacattttctgatatgatgactttactttacaaaagccactgcacgaagcccggaaagaacccgctaagtgccggtgacatgtatcgcatggaagcgtctgaaagacaggcgccaagtgttcataacaaggagggcgtttgatgtatttatccattcgtttaagataagcagcaattaaataaaacctgatatggtttttttgttgtgcctgttttacggatgagatgcagatacgcctgatatatttttatgtaatatgtgaattgcccgccgctgatccgggggacagtttgttttctacatacaggcaaggcagatagaaccgtaatggctttatctgccttttcatgttgtatttatattgtatttatgcagtatgtatgctctatacagccaaaacaggctttgggacaaacccaaaacaggacgccatgtcaggtcagatccagaatacggaaaggattttttaatatgaatgattattcaagatggaaacagaaatttctgaccattgcagcaggccagactgtctcccttatcggaagctctgctgtccagttctcgctgatttggtggctggccagcgaaaccggctctcccatgatgatggcgttatccggcctggtggcatttctgccccaaatcttcctgggtccctttgccggggtgtggattgaccgcctgaagcggaaacatgtggccattgcagcggatatgttcatcggcctggtagccgtggtctttgctgtcctcctgtgggtgggccatcctccctactggtctgcctgcgcggttctgggcattcgggccctgggaagtgtattccatacacctgccatccagtccatcgtgccgcagctggtaccgccggacaagctggtccgggccaatggctggaaccagttcatgcagtccggcgcctttatgctgggacctgtcataggagctgccatgtatgccgcgctgccgcttccggtcatcctgctgactgattttataggcgcatgtgctgccagccttacaatggcggtggtaaccatccctgaaccggaacacagccatcaggaggcccctcatttaatccgggaaatgaaggaggggcttagcatctgcatgagcgaccgcaggctgatgaagctgactgcggccgcggctattaccatggtattttatctgcccctggcctcctattatccgctgatgtccagcacttattttaaggccagtgcatggcatggaagcgcggtggaattcctctatgcccttggcatgatggtatccgccatcatattcggcagcctgggcaaggtaaacaataaactgaaggcctcctacctgggactggccggaagcggcatcacctgctttatctgcggcatcctgccctctgatatgtgggcctggtatgtttttgcagcgacctgcatgttcatgggcggagccggcagcgcctacaatattccattcgtggcctatctgcaggagaccatacctgcaaaagcccagggacgggccttctccctcttgggaagcatcatgtccttagccatgcctgtggggctcctcatatccagccctgtagcccagattttcggggtaaatatgtggtttttggtatcgggaatcggtattctggctgtggtggctgtatgctggctttcaggaaacgattaagggaaggcttatctttgtcaggaaaaaaccggcttcccggccgctgtaaaaacttccgccatggtccccaatgattttagcgcaggtcttaaggccgattccggtgctctccttttcctgcgcgtcctctgccacataattgccaaaacagatgataagacaatccgcccgctgctgataggatacggttaccgggcggttcctgtccgcgtatttgagcagattggaaaatatatttccgaatacccggcggcacagattaatgtccgccaaaagcctgcaattgatttcatcggaactgcgcctgatgtcaaagccctcgctctccatgtcaaagaggctctcctccacgatttggcccaggaattcagccccattaacctcctctgcctcaagctcttccctttttcttccataaacaatgaaatattcaaacaatttatctgaaagttcctttatctggtatgccttatcccgaatggaattcagatactttctctgctgcccccggtcttcccccttctccatctgaagtatgtccacataacctaacagggacgtcagaggagtgcgcagatcatgtgacatggcagtgaccagctcacggttggcctttcccgcttcctcctctttctgctgccgttccttgatggcacagcgcatggcatcaatttccgctgccagggaggcaagctcatccttcccctttaccgtaatccggtaatccaggtccccgccttttaatatctgtatctcctgttccatcaaatctatgtacctgatttttccgcgaatcagcatgaccagcatcagcgcaaacactgccatggagatcacgcctcccagcacactggcggcagcataatatccatattccacataatagctgacccctgcctgggcagtcccgtctgcaaatttcacctcataaagccatgaggtatcttcccactcattcatttccggaaccataaccatcaccttggcgtcattgctgtaccgaaacctgccgtctttatagatggttatgagaaggttcttttctcccgacgcccacttgtccagcattttaccgtcattcgtggacagtccgttctctgtcacatacgcctgaagccgctccacgcaggcctgttccctcagaatcattctgtcctcactgaaaagcacacggtccaggataccaaaaagcagtgtattaagggccatgtagagagccagtgaaacaagggccgacgccactgccgccagggtaagctctgtccccagcctgctgattctcctgctcttactcaatccgatacccctttccccatacattgacaatatactttggattctttgggtccgcctccagcttcctgcggagattcctgatatgtaccatcaccgtgttattggcgctgtaaaaataggcttccccccacacgctctcataaatattctcaatggtaaacaattttccccggttggacgccagcagtaaaaggatgcggtattccaaatccgtaagaagaatttcccggctgtttttcatgacctcattaaatgatttctgaatgaccagatccttaacagttatggattcctctccatcctcctccttgcctttatacacatggtaccggcgtatcatggcctttaccctggccgccagctccgcataggaaaatggttttgccagatagtcgtcacctcctgccccagatcccatggtcttgtcggagtcctgggtgcgggccgtgaggaacaaaatgggcgtatttaacttccttcgtatctctgcgcaggcagaaaatccattacgtcccggcatcattacatccagtataatcaggtcaaatgtatcgtctgccgcagacgcagcctgctccccgttctctgcttccacaacctggtatccctcactttccagcaggattctcactacctcccttatctccggatcgtcatctgcaaataaaatcttccgcttgtccaacctgacacctctctttataatggcgtgtttcatttttaaccatccgggtatggatgttccgggatggccaaactatcttcattatatctcagatattctcttacttccaccaaatagtcctattgattcaactgtttttgtcccttcttccagctgttctttcccgtcagtcatgcttgattgcctccagcgctgaaatctttactgctttgccggccggataataacctgcccccacgcccactgcaatggaaaacaggaccgcaaacagggacagccaccacggtatcacggacagcctggaaggaagcaccgccatgtccgcttccatggctccggccatggatgaggacgacattccttcggaggtcatattcatgacaaaggatatggcataactgaatacagtccctgtcactcctcctaacagcccgatgcagcccgcttccagaaggaatatccttcttatgtccctgacaaaacaccccagcgacttcataactcctatttcccttgtccgctcagatatggacataatcatggtgttggtaattcccagggctgccacaaacagggaaatggctcccaggccgcctaacatcatctgtttctgtctggcctcccgctccataggctttcggatggtctccatggagctggtccgaaagcccatacgttttatttccgtctccacctccgccacctggttcatatcctttaccttcaccagggcgcctgaatatccctttttccactccggcttcctgccgctcagcttagcctgctggtccaataaggtcttaagcatttccaggtccatcacaagccccatggatgtctcctctccttttccgtaatcctccttcattcttcccgcggcttccagctggcgcgtgattttcttatcatcctccttatcgctgctgatatccagcgtataggctgttttcatggaatcaaaatatggctggggcttcacaggcattccactttcatccaggttatcatatccgctgtacatatcaaccgtgtttctgccggaaggcctcttggtgtcctcaaacatataggcaaaattctcccccacaaagacaccatcccttccccccttgtcccaggtcccgtccgtcagcttgtatcccatggcttcggctgcctttacgtcaatgcccacaatggtggtgtaggcggacttgtaacgccggtttcttccggcatacagggtgatggggatgttttcagctgtaagttttggcgtgactgcctccactgatttcatttcctttaaacgccggattgcctggttattcagctttgccgagcggctccctttgccggccgaatatacattgataatggtcagatctcccatctgggccagcatgttcttctgtgcctccttcattccgattccaatggatatcataatgaccacggagcagcagcctatgatgactcccaatacagtgagaaaggtcctgcttttatggcgggtcagattctggagacatatggtgagtaagtcctttgttttcatgttttatcttcctcattttccgatggctgatcacggctgtcctccagttcatcccagccttccaaatcctgactgtcctccagttcatcccagccttccaaattctgaccgtcctccagttcatcccagccattctgctcctggcaccggctgcggtccttcaatcctttggctttttttctcttaatccacagaattcctgacaccagtgctgcagttagaataccggccatcattttccagttcattttccttcccccatccatttctccgtccatcatatctgcgccgtccgtttcttcagcagctccttctttcacctcgaatgtcacaggaatctccatggtccttatctccatggactcgtcctcatatgtcacttttaccctgccctcaaaggtccctgcctttttcggggttgctataaaatcaatggtcccgctttttcccgcatcaaaattccccagattcaggcttctgtcaattacctgtatgtccccttccaaactggcttccacattgtacacctgtcctcttcccttgtttacatagggaagcgagatggtggtctcctcattctgacggatttcctccacaaaagagggcgggctcacctggaaccggtctggctggtaaaccggcactgcaatggtttctgcggcagtagactgttttctctctgttttatcaatgtactcatatttgcacgatatggttatcttaggggactgtaccttggaatcctttgtctggaacaatgcctggacatccacctgctgtgcttttttctcacccggtcccatctttggaacataaaatgtgttggaggacgagttgatagataaaccttctcctgtttccagcgaaatgaccacgttttctatgggagacacctgactggtattcataaactccatgttcagacgaaacacctggcctgctgagactttatctccatatgtataattagtcagtatgatatttggcgtgggggctcccggagtggctgtcttgccattggtaggcaccacgattcgttgggaatacgtaccctggaccgttcccttatctgtatcataatcaaatttcaaggtgatacccaaaagctgggatgctgctgacgacaattcggatcccgccttaaggttcacagacacgtccacggactgtcccggccctatatccccaatctgccgtgtatcggttgcctccagaagagatatctggtcatttggctcaaaggtagctgtaagattccgtattcctttgactgtgtcggtattttccagttttaaagtaatctgaaacggctggccggaactcactggtcccataggtcccctgtctatgagcagcacgggctgtcctgtagccgtgcctccttttacaggcagaagcaccttttgcacagaggcagccgatgtaagctgtcctcctgaataatagttgtattttaactccaaatcaataagctggctgggaccggatatatcctgtcccgctatcagattgaatttaaccagctcggctctcccagtatccaggcggctaacgatccttgtgttagtgtcaccgcctatgaacagggaacttcccggcgatacatttaccaccatatcctcgatatccgcatctttactggtgttctcaagctccacttccagcgtgaagtggtcaccggggccaacgggattttgcggcgagattctcctgactcttatgattggctgccctgtggtacttcccgtatccccattttccctgggagccgactcctcgcattccgaaatatttacttccagctgttcagagggaattccggaactcttaaatcccaccttcagcctcagaacatccccctttcccgtataagtaagcctggtaaacgtcactgtaaactccaggtcgtcctccttgtccgatgtgatctttacctttggattttccccattgcggaagctgtcgctgagttttgttaccgttactccccgttttcccacctcacttgtcttgattccattgcttcttacattgaccaccacctttgcctggcgccctttgcgcagcacatccagggtgtccttcgaaccgcccggtgcaaaaatctcatactcacccacccacaggcttccacttcccggggcaccatcgtccggattattggaatcctcctttcctctgacccgtcctccgctgccctcctggctgccgccgtcctgagccccgctgacggaatcagcccctgaaccgcctgtctcactgcccatctcacggcccgtcccactgcccggctgggatgttcccgctacaccggtttccgttccggcactttctgttgtgctgtctcctgctccgttggctcctgctccgttggctcctgctgctccggcttccattcctccagtcccctctccagccattccgccttcgtttctctcattaatcccttctgcggcaatcgtttcccgccccccggaactgtctgtctcctctgccaaagcatttccgcacattcctattatcatagcagttgaaatcatcactgccgctgcccgtttgagccttcctgttatctccatcctcactgtcctttcctttcatctcccgttatgattccgtccaccagggtcacgattcggtccgcatacctggacatgcccgggtcatgggtcaccagtatgatggtctggttaaatcttctggcaaagcccatgaccatgtccatgatttccgctgttgtttttgtatccagatttccggttggttcatctgcaaacactacctcaggtctggacacaaatgccctggctattcccgctctctgctgctggcccccggacatctgggagggataatgatgaagccggtgtgaaagccccacacgtttcagcatttcttctgccatggcctcccgcctcttccggtccattcccttaaacatcaggggcatagccacattttcaaccgctgtcatggacggcagcagattatatgactgaaagataaagctcatatgttcctgccggaaagcggccagttcctcctcattcatatccgatatatttttcccgcggataaacacctgtccttttgtgggtttctccattccggccagttgattcaaaagcgtactctttcctgaccccgacgttccgaaaatacagcagacctcgcctttataaatcctcagattaatccttttaagggccaccacttcctcgtcccccatccggtaaaccttgcgcacatttttaacatatatgattggttttccatggtccattatcttgtcactcctctttttatgtgtctatgatagaaaataatcccctggaaaatacctcatataaatcttaagaaatcttaatttcacacatgtctgtattttgggatgaccttttgctataatggttccatatgaacggataactgccggaaaaaggaggagaggaaatgaaaggcgcgattctcgaaaaaggtgaaacaggttacacctatctaaaaaaactgttcctttcaatccgccacgcccagaaggactttaactggctcatcaccgactgtcagtgctgtacccaaagcgaagccttttatcagagaatattccagtatgaccgatatggctggctctccggagaggagctgacctgcatggttgagacagaggatttccagtggatttgggctgttctctccggcttcccccggcatatctccctggaccaggtactggaatacgacctgccctatgctgacatgtacaccggattctggaccaatcctgtctccatccagcaccccctggcccaggtggaaattgttccctgggacagttcctgcacccttgtcataagccggaatcacaggatcgtgtcggatttcatggatggttttccccttagcagggatttatctctgtacaatgagcaaaagggaatctttgatgagtcggatgaactggagcgctggctttcgcagcacaaatagggccttgctccaaaatcctctgcccataggaaaaaagcccaatacaaaaagaaactccatttcggaaggaggtctaattccggaatggagtccgttttcaggaaaggagcacaatattggaacatacattttggaccgcactggacaaattagtggaacagtcagagattatcatagaccgtccaaaggggtcggttcatcccgtacatccggactttatctatcaggtggattatggatttctgagaaatacatcatccatggacagggagggcatagacatctgggcaggcagtgaccatacggccgggattgacgccatcctgtgtacggttgatttgttgaaacgggattctgaaatcaaaattctcctggattgtacggaggaagaaaagatgttgatatacaaagcccacaacgatacctcatgtatgaagggcatcttaatacgccgaaccgcagggatttcttataaaccatgagagaattatcaaaattaccaacttaagcagtcaggcccattgagccgcttttatgaatacctctgtcaaaaataagattcccataagtaattattaaatattttcatattttattaagaggctgctcaaacttttgacatatctgaactgtatactttagtcatagatagataaaacatcctgattaatacaatatacagctttttcatacccagccggcgcgaccccatcgcgccggctcctctccttttcagggatacataatcctatcctcccgtactcaccgtcttataccactgttcatcttataccactgttcatcccaaaatccccctttcccttctttcctatatccctattcaaatgaacagccatgaataaggctgtcatggcggagagaacatctgctgccggctgcgcatacaggatgccgtttaatccccacagcgccgggaaaaccaggataatgggaacaaaacaaattccctgtctgcatgccccaagaacaaacccctcccctgcctttccaagagccaggaacagagaggaatacacggtgtagaatccaaataacaggaaggataatccattggccttaagagccttttgtcctatacggatcatttccatgtcgttctttgtaaaccgtgaaatgacagggccggagaaaactgccatagtaagtccgaataccgcgcagaacagggtggaccacaccaccgatatcctgattgcctcatgaaggcgctcatagttccctgccccgtaattataaccggcaatgggctgaaatcctttgatgaatccaaataccatcaggcttcccagggaaatcattcttgtgacagctcccatcccggcaatcacagagtccccatacggctttgcctgcatattaatcatggtgatggagaggctggtcagcagctggaaggccagagtgggaatccctattttcagtatctcagacatgatttcattggaaaaacagcagttcctgaaacgaaagctgaacatgctccttccgctgataacataatacagatagatcagggtggaaactgcctgtgaaatagccgtggcaatggctgctccagccactcccagcttcaggacatagataaaaacaggatccaggaccatattaaacgcagcgcctgtcagcagaacgcacatggtggtcctggctgcgccctcgctggtcacaatattattcatggtgacgttaaacacattgaatatggatgacaccacataaatacccgcgtatgtaacagcatagggaagtatactgtccgttgctcccagacactttaacaggggcttcaaaaaaatgaccgcgcaaaggatgaccgccgctcccacaaaaatactgctgtacagggccgtgcttgccgccctgtccgcagtctccctgtccccgcggcctaacagtctggatatataggatgccccgccgtttccaaagagtaagcccaatcctaccacgacctgccccaggggaaacgcaacggaaatcgcccccatctgacttgtccccagacctcccacaaaataagcatccaccaggttatacagcgcattaatcatcattccaatcatggtgggcagccccatggctaacagtgcctttggtatgggcgcgtttcccagcagctccattttcttattacgtccttccatcttgtactctcctttcacttgacacaacttgtaaaatatagtactataaattatagtaaaatggccatagggcacatgatactataatttatagtacttgtcaagagaaaaaaggaggtcgccatggcaaccatagatttaattgtactgggtattttaaaaaaggaatccctgagcgcctatgatatccagaagctggtagaataccggaacatttcaaagtgggtgaaaatcagcaccccatccatctacaaaaaagtaatccagctggaagaaaagggatatattaagagcaatatgataaaagaaggaaaaatgccggaaaaggcagtctattccctgacagaagccggtgaacaggcatttgaaggcctgatgttggaaattgcgtccaaaccaatccacatctttctggattttaactccgtcattgtaaatctgccaagcctgtccccggacaatcaggcagattgtctggacaggattgaacagaacgtgaacattttaaaaacatacctggaagaaaatatctcgctgaaagaacatttgccggagattcctgagacaggtatggcagtgctgcagcaacagttcatcctggcccaggcaattgaatcatggattgcctccctgagacatactttgccggaatcatccgtccatacagtgccgcaaagcaggaagagttaaggcaaacaccgctatccccagtgttgccccgccggatatcagaaaccagttctcgattcccagcggaccggccagggctcctgacagaacaagccccagcggcattgccgccatgctgatactgccggacaatgacagcgccctgcccaggtattccccctgaattttgatctgataaatggatgtctgtaccccaaaataaaaggggacagagattcccatgaaaaatgacaggaaggcaaagatataaaatccttgtggaggcagcaggccggttatcagggtaccggctccatatatacctatggacccggcgattgcctttatcttgtctatccggccgccccatatacccagggaaacagagccaaccagggtaccagctgcaaaaacagtctccaccagccccgattcactgacactgccgttaaaataagacatggtaatcagaggatacagggtccctatgggaaaatatatgactgcatataatgcgccaatcaccagcagctcccgcattccgggtacactgcgcataacgttgtacccctccttgacctctgccagaagattcgttttttccttatcttccctgaaaatttccggtatatccactgccgccagggtacacactgcaaaaaacgctcccaacacatccagcatcagaatggctttcagcggaaacatactgtacaatacagccgcaatggcaggactggctatcatggacgcagattcaaagctctgtgaataaccggcgtattttgtcagctggtcctttggtaagatggacggcataatagcctgaagggacggggcataaaacgcattgccaatgcttcggatgaataatacaataaaaatcagccagatcggaatgtccccccaaatacctgaaacagccagtgccacacaggctgaggacatcaccagatccgagcaaatcatgattttcttcctgtcatgctggtcaatcagcacgccgatgaacatccccagtacggcctggggcaggaacccggccagcgttgcaaaggaaagaacggccgctgactttgtctttccggttatataccatatgattgccatttgtacaatagagctggtcagggtcgatatgccctggccggtccaaattacaaaaaacttctttctccatcctgcaaactgctgttccatggttttttccgctgcctcctctgctgctctttcattgtcaacgttacgctgtcacatggtttctctccgtcacatggtttctctccgtcacatggtttctctccgtcacatggtttctctccgacgcatattttctctccgccatatatcatccatcctccggaattcatatcccctcccgctcaaatatctccttcagcctgagggcgtcctccagcgtattcttccatccatcccgtttcatgtccacgcatccctccgccgataccaggacctcttcctcctccagaagcattctctgcaggtccggatgttcaaaggacgctgcgccggtcagatatccctggctgttgaccacacggtgggccggaacttctccggccagaccgcggttcagcgcataacccacctgccttgcgtttttcggttttccgcagagcagggcgatttgaccataggtagctacctttccttccggcactgtcctcaccgtaattcccacccgtttataaaaatccatcttccttatcctccggcagcagccatgcccatttatctcacttattttttcggaatccatttctatatatctgaatcctgctcacaaaaagtatatatattgtatcatgaagcataccatttaaacagacaaaatacaaaaccaaaaaagcccccaggacaaatccaaaaacacaggactgccccgaaggccttcttactatttcatatacatctgctgcatttatttcccctgtccgtaataagcattgggcccatgcttgcgcatgaaatgcttatcctgcatacactggggagctggtcctgcctggggattgatgagttccgtcatgaaattcatcctggcaatctcctccagcacaacggcattgtggacagcctcagccgcgtccttcccccatgtaaagggaccatggtttttacaaagcacagccggaatgtaaaccgggttcttgccctggaaggtctcaatgataacccttccagtattcatctcgtagccttcctcgatttcctctgccgtcaggtttctggcgcagggaatctcaccgtaaaaatagtccgcatgtgtggtgccgtagcagggaagagccctgcctgcctgtgcccaggccgttgcatgaggggaatgggtatggacaataccgccaatctccttaaacgcattgtacagctccacatgggtggctgtgtcggaggacgggttcatctcaccctccaccttattgccctccaggtccatgaccaccatatcagatggctttaacacgtcgtaatccaccccgctgggctttatgacaaacagtcccttttcccggtcaattccgcttacatttccccaggtgtaggtgataaggcccctgcggggcagctccatattggcttcatataccttttgtttcaattcttctaacataatctgtatccgctcccgttcctgttaatccttctgtgctccacagcttagtccttcttgttcacagcttagtccttcttgctcacagcttaatccttcatatgctccacagcagccttctcaatggcaagcccctctgcataccgcttcatgaatgcctcgaatccttccacatcctctttcacaggctccattctggttcccttatccccggcaaaaaccttgttggccaggtaagcgtccagggtctcgccctcctgcctgcaccgcatgtaggaggccagcagcgcaatgccccaggcaccgccttcaccggctgtctccatgacagacaccggcgcgttcatggctcctgccaggattctctgtcccacaccctttgtcttaaagagaccgccgtggcccagaatactgtccaccttcacatgctccttcttaagcaggatatccatgccggtcttaagggcgcccagggatgtatacaggtgtactctcatgaaatttgccaggttaaaccggctgtccggcatacgcacaaacaggggacggccttcctcaaagtgtgtgatgtgctctcctgagaaataattgtaggccagcagtccgccgcagtcggaatctccctccagggccttgttgtaaagggttccaaagagctggttcatatctgccttcatacccatggcctctgagaactccttaaacaggttcacccatgcattcaaatccgacgtacagttgttgcagtgcaccatggctaccatatcgccggccggcgtggtcaccagatcaatctcaggatatacgtgctccagttccttttccaataccaccatggcaaacacgctggtaccggcagacacgtttccggtgcgcacagccacgctgttggtggccgccatgccggtgcctgcgtcgccctccggcggacacatgggaatgccggctttcaggtttccggatgcatcaagaagctttgccccttcttccgtcaggacacctgcgtcctctcccgccaccagagccttgggcaggatgtcccgcagcttccatgggaaattctctcctgccaccagttggtcaaactgttccacgcgcttctggtcaaaatccctggcatggatgtccaccgggaacatgcctgccacatcaccaatgcccagaacacgtctgcctgtcagcttccagtgcacatatccctccagtgtaatgaggtagtcgatatccttcacatgctcttctttattgaggatggcctggtagagatgggcaatgctccatctctgagggatattgtaccggaatacctctgtcagcttcccggcggcaggacctgtaatggtgttcctccaggtgcggaagggcaccagaagctcgccctctttatcaaatgccatataaccgtgcatcatggctgaaaaaccaatggaaccaatggtggtcagggtgatgccgtaggtttccttcacatcctcagccattttgccgtagcagtcccggatgccggtccagatatcctccagggtataggtccagatgtgatccacatacctgttttcccaatcatgactgccggaggcaatgggtgtgtggtcctcaccgataaggactgccttaatcctggtggagcccagctctatgcccagggaagtatttccatgctcaatctgttcttttatcttatttatatctaaactcatgaattgcccctccacttactcattaaggagcgggcctgagggcacataaaaaatatgctcccagggtccgccccatatatcctgttcctaatccgcaggccgcctcaaaccgccgcagcttccggacgcaaagcattctgcctcatgcctacctgtaaactgccgcattccagcgaagctcgttcttaagagcgcggatgcttgtatccttgtcaatatagactgtctcaatacccatggcatcagcccagtctcccatctgctcggccgtcaggtcataggagaacgccgtatggtgggcgccgcctgccagaatccagctttctgccccggttgccaggtttggctccggcgtccagaacgcggttgccacaggaagcttaggcattggcttttctgtttttttgcactccacatcgttgataatcaggcggaaccttgtacccagatccactaaagatgtggcgataccatggcctgtcttggatgtgaatacaagtctggccgggtcctccctgtcacccatggacagcgggcaggccttgatgctgatttccccgtctgcaatggtggggcatacctccagcatgtgggcttccaggattccctccttgccaggcactaagttgtatgtataatcttccatgaaagaggttcccttggcgtccttcatgccctgggtcataatcttcatcagcctgaccatggcagccgtcttccagtcgccctctgcgccgaatccgtatcccttttccatgagacgctggatagccagaccgggaagctgctgcagctcgcccaaatccccaaagtgggtaacgatggcgtggtaatccttctctaaaaggaacttctcaaggccggcctcaatctgggcctgtaccgccacatggcgcttaaattcctccggatccctgccttccggcaggatggtgtacttgctgtaatactcgtccaccagggctgtgatatccccctttggcacagcctttacatattcggccagctcattgaccgggtaagcgtccacttcccagccaaacttcatctgggcctctaccttgtcgccttcggtgacagccacattcctcatgttgtccgcaaaccttgccaccctgacatggctgctctccatgatgcccacagcagtgcgcatccatgcggctatgcggcccaccaccttctcatcactccagtggcccacaatgacctttctctctatgcccatgcgtgtcaccatgtggccgtattccctgtctccgtgagcggactggttctcattcatgaaatccatgtcaatggtatcatatggaatctcctggttaaactgtgtatgaaaatgcatcaggggctttctgtattcctgcagtcccaaaatccaggacttggccggtgaaaatgtatgcatccaggtgatgacgcctgcgcactcctcatccgcatttgcctcgttaaacgtcctgcggatcagctcattggtaatcagtgtgggtttccacaccacctcatagggcaggatgcctgatttattaagactgtccacaatgattcccgaatgctccgccacatgtgccaggcactcatctccatagagatcctgtgaacctgtacagaaccagaacttataattctttactgctatcatatctctcatcctccttaattgtcagcccctcaggccgctgccggccggttggcgcatcgctgtctgtcaatcttctgtctgttcttcttcctcatcatccggaatctcgccatacttaatatattcgccttttatgaatttcttaagggaccagccggccagaaatgcacctatggcgccaaaaagaactgcacagccaagctgtaccatcttgcctccgcccgcaggttttaaaaactcctgcagcaggccaaaggccaggtatacaagatagcctcctgccgccagacgcagtattacggttatctgagttggtttcgcggcattttcttctttctttgcaccggtttttgcacccattacatttcctccttatgcggctgtttcaggacctttaccgaatcccgctcaatgatatccgaatcaaacagatagttaccgtcaaaatagggattttcaatcatacttatcatgttctctgctgctttcctgcccagcgcctccatggggtgcgggaaggaggtaagctttacgccggccagggttgccaggtccgagttgtcaatgctgacaacagacagctggtccgggatggcaatgccccgcttctcgcagagtcctgacagcacataggccacctcatcgttatagcataccactcccgtacagctttccagtctgcgaaacagataatccgcccactggtccaggtccagaaaatcttccgtgtccagccataccacattggcatcctttaccttgattcctgcctccagcatgcctgacagaaaccccttatacctcaaatgcccctgtccgtcatcgcttttgaacacgcctccgatattccggtggccgttcttaatcagatattccacagcctttttgcccacctgctcgtcgttcatggacacgcagggcagctccagctccggataccggctgttgaagaacagaatcgggattccccgttccttaagctcctggtagtaatgcagatttggattggggagggcgcttttggccggctccacaatcagtccgtctataatgtctttgtcgatcaggttattcaatatgtcctgttccctgctgacccggttgccggtaaaggcaatctgggtggtgtaaccttttttggagagaaccctctcgattccccgcaccacaggagggaaaatatagctgtccacataggtactgattacagcgatgttcatgtaccgctcctggcgctccgccttgccgttgccgcccacatacgtaccgcttccccgcacccgtaagaccagcttctgctgctccagaatatccacggcatggcgcaccgtctggcggctcagaccgaaacgctcgctgagctcattctccgaaggcagcttttcgcccaccttcaaagccccgctgttaatgttgtccaacacccagttatagactgctttatatttcagctcctgtgtacccataatcaaaacctatccttttttcctctttgataacaagtctaccgtaaccgcacctaaaagtacagcgccttttacgattttctggatgtcggtggaccatccgtagagggacataccattgttcaggatacccatgataaaagcacctaccacagctcctatgatggttccgataccgccgctggtagccgcgccgccgatgtaacaggaggcaatggcatccatctcaaaaccgtcgccggccttgggggttgcggaggcgttacgtgcggaaagcacgatacctgcaatggcacttaaaatacccatgttggtgtatacccagaagaacactttctcagtattgataccggaaagctttgccgccttggcattgccgcccagggcgtatatctggcgtccggcaacggtcttgctggtgatgaaatgatacaggcccaccagtacgcccatgatgaccagcacaaacgggatgccgttatagcgtgacagcttgtagaagaagaaccatacgatcatcagaatgacggcttcctttataataacctgccacaatggattggttgagaaaccatattttttcttggtattaatgctcttaagctctgccataataaccagtaccgtggcaatgcctgccacaataatggaaaccaggtccagggtgccgtttccaaagggaatcttcacagtcggcagaaagcctgcgccgatataagtataactggtgggaaggggtccctttgtctgggcctttaacagggtatatgtaagtccgcggcccataagcatggttgccagggttacgatgaacggcggaatgctgagcttggatacaaacagacccacgaacataccggccagggcgcccactgccagggcagccaggatggcgacccacatattggtgtggtagtcaatcatcaggatacctacggttgcgccgcacagggccacgatagagccgacgcccaggtcaatgtttcctgtcagacagcataacagcataccaactgccaggataaccacatatccgttctgcatgatcaggttgttgatgttggccggcgacatattctttccgccggtcatgactgcgaaaatcaagaacaccgcgattaaagcaagtaccatgccatactgcttcatatcaatattaactgttttcttcttatccatctctacgcttcctttccattatccgccataatacatttcatgattcgttcctgggttacctcttccttggtcagctctcctgcaatccgtccttcgttgatgacgtatacacggtcacaggtaccgattacctcctgcatctcagaggagatgacgattaccgccttgcctgacttggccagttcattgatgacgcagtaaatctcatacttggcgcctacgtcaatacccctggtaggctcatccagaatcagcacatccggctgtgtcagcatccacttggcaagaaccaccttctgctggttgccgcccgatagggagcccacggtctggttaatggaattagacttgatgttaattttcttcttgtaatcctccgcagccagaatctcatcattttcattgagaacaccgttcttggaaaagaaatttctcatggcggacagggtcatattccacttgatatccttaatcagcacaagtccataattcttcctgtcctcggacacgtatgccagtttgttgttgatggcgtccttaacgtcctttatatgtacttccctgccgtttatcttaatggtaccgcttattttctgtccgtaggacctgccgaatatgctcatggccagctcggtcctgcccgcgcccataagtcctgccaggcccacaacctcgcctttgcgcacatgaagggaaacgtccttgatgacctgcctctgggcgtcgtcggaatggtacacattccagtcctttatctcgaaaatcgtatcaccaatttcacagtgccgttccgggtaacggttggtcagctcgcggcccaccatgcctttgatgatgcggtcttccgtaaattcatctctgcccttctccagggtctcaatggtctttccatcacggataacggtaatggaatcagccacataactgatttcgttcaacttatgggagataattatgctggtgattccatgggatttaaggtccagcatgatgtccagaagccggcggctctcttcgtcgttgagtgcggctgtgggctcatccagaatcagcagctccaccttcttggccatggccttggcaatctctatcagctgctgttttcccacgcccaggctgctgatgggcgcgttcaggttctcgcctcccagtccaaccttttcaagcatttcctgggccttcttatgggtaagtgtccagtcaatgatacctttggctgctttctgctcatttcccagaaacacgttctcagccaccgacatgtacgggctcagggccagctcctggtggatgataacaatgcccttggcctcagactgcttgatgctgtggaactgacacacattgccgttatacacgatatccccgctgtatgaaccaaagggataaacgccggacagcacattcatcagggtggactttccagccccgttctcaccgcacagcgcatggatttctccgcgttttaccttgatattgacatcgtccaaggctttcacgcccgagaattccttcgtgatgtggttcatctccaaaatataatcggacatcttttcaactccttttcttgaaagatactctgtaaaaagcgcaatcgggcggcggaacctatgccgccgcccgaatcatctttactgtgccagctgctcctctgtatagtagccgccgtctacgataatttccttatagttgtccttgtctactgctaccggtgtacacaggtaagcaggaaccacaaccttgccgttattgtactgttcggtgtcgttgatttccggctctgcgccttccagaacagcctgtaccatggttacgcacttctcagccaggagacgtgtatctttgtaaatggttgctgtctggtaaccggagatgatgttcttaactgccatcagctcagcatcctgtcctgtaatcagcggccagtcctcgccaaccttgtagccggcgccttccagagcagccttacagccgtatgcgaaaccgtcaaatgcgcttgcgcagatgtctaacttctcgtcagcatagaagccggtcagatagttctcgcagttctgctgtgctgtttcctgggaccatctcaggatacatgtatcctcgaaggaggtacgtccggacttgcagaccagtgttccgtcatccaggtatggctgaagaacttccatcagtccgttgtacaggaacagtgcgttgttgtcatcaggtgagcccatgaagaactcgatggtataggactcgccggctgccttggctgcgtccaggtcctttgcttcctttatgtagttgccgattgcagtaccaactcccttgttgtcaaaggttgcatagtaggaaactgcgtcggtatccatcagaagacggtcataagcgatgatggggatgcctgcgttcttagcctgctcctctacgtttacaagtgcggaggagtcgatggatgcgattaccagacagttaacaccggatgcaatcatgttctcaatctgtgaaacctgcatctgcacatcatcttctgcatactgaaggtctacttcatatccaagtgcttccagctgcttcttcatgttggcaccgtcgttaatccagcgctcggatgactgtgtaggcatggcaacgcctaccttcttgccttccccggttgctgccttggctgcctcggtagctgcgtctgccgctgcgctggaatcagccgctgctgcggttgtgtctgctgccgctgccgctgccgctgtggtagctgctgcctcctgtgagccgccgcatcctgttaacagtgaagctgcgattgccgtccccagtatcatgcttaaaatttttcgtttcatatgttacctcccatggtttaatttatacatacaacttgtgtacatgttcacaagcttgtactttcgttaattcagctaacccttgcgtcataccatctgattcatttggaccattttgcacttttgtagatttcgctctgtctgcattgtgcgtttcgtcaatatttcttacgtttttctttaaatacactatacatttttgatgcttgtttgtcaataggtatttagaacttttttatattttttattgttgtacgtacaactttaacgtcattttacctattttcgtctaaaaacgacctgtctcatcctgtaaatagttctgaatcccgttccccggacgcaaaaaatgccagcaagccgacgacaggcttgctggcacaatgttctgttaaattttcaactcttttttgtttacttttgcctgacggccatgtttcggtgattccccttacttgttctttctcttcagtgctgcaatcagactctgaagcacgatgaaaaagcacagaagggccgcaatggtaattctcacccaccaggaggaaagcgttccctggaaggtaataaaggactcgatggttcccttaatcaaaactccgaaaaggcttccgataacatttcccacgccgccggtcagaagggttccgccgataactgaggacgcgatggcatccatctcaaatcccttggcctgctccacgaaaccggagcatgtgttcatacagaacagaaggccgcccagaccagccaggaatccatccagcacataagcctggagcttgattcttctcacattcagacccagcagcagggcagactgctcatttccgccaatggcgtaaatggaacggccgaacttggtatacttaagcactacaaacacaatggccagaaccaccagggcgatgataacactggggtatacgtaaggataaatcatgactccctttttattcaggtaaccgccaaagggcaggtacatcttgaatgtggcaatgccggtaaatgtcttatttgtgatgctgatcatctcctggctgataatggaggtcatgcctcttgcaaagaacatgcccgccagggtcacgataaagggctgtatcttaaggtaggccaccaaaaagccctgtaccaggccgaatatacatcccgttgccagcacgataaggatggccggaaacgcaccgatatttcccctctccatcatccaggccagcatcatgcacaccatggccaccacagaaccaacggaaatgtcgataccgcctgtaatcatgacaatggtcatgccggttgccaccacaatcaggcccgcgttggatatgaacaggttgaggaagttctgtacctttgcaaatcctctgccgccaaacatgatgatacctgctatatacatcacaaagaataatatgatggtcacagccagcaggaaggagttgccgtccagtcttttcttttcacttctgtttttcattatgccactcctccttccacgttcttggatgaatgtctggatgccagacgtttcctgaatttcttaagttcctctgactgcacagccacaatcagtataaccacaatggccttatatacaggaatctggtccgcaggcacgctcatggcatagagggtggtggtcagggcctggatggtatatgcgccgattacggagcccagcagggagaaccggccgccgcccagggagttgccgcccagggccactgccgcgatggcatcaagctccatgttgaggccgatgttgttggcgtctgcggaatagatgcgggaggatgccaccagtcctgcgatacctgcgcacagtccgcagaacgcataggccatccagatgattttcacggatttaagacctaccagccgggatgccctctcattgatgcccacggactggatgtacattcccatggctgttttcttcagcagaatataggtgagcgccaccacgattacagccacaaaaataggggtgggaatgggaattcccggtatgttgttgcccagcagcttatatccgtccacgcggatgtatgtgatctgtccgtttgtcaccagctgggagatacccctgcccgcggtaaacagaatcagggtcgccaccatgggctgtatcttaagctttgcaaccagtaagccgttaaagccgccgcacaccacggccgctgccagggctgccagcacagccaggacgtagggattggcatactcattgaccgacacctcaccgcctgccaggaccctggtacacacagccgcagccactgccatgacagcgcccacggaaatatcggttccggcggaggcagataccaccagggtcatgcccacggccagcaccaccagctcgctggcacggttgattacgtcaatgatatatccgtagaggacgccgttattaatcgtaatcctaaaaaacgtgggtgtggtaatcagattgattaacagtactatgataagacaggataacggaagaaacagcctgtaacctgtcaactttttaagtttccccatcattcttcccctcctcctgcaattgccttcatgatggaatcctggctcagctcgtcttccttaagctctcccaccttcccgccgtcgcgcatgaccgccatacggctgcaggtgcggagcatctcctcgatttcagaggatataaacaccacggacatgccgtcctccgcaagcttcagcaccagcttctggatctctgtcttggtaccgatatcaattcctcttgtaggttcatccagaatcagaaaatcaggattggtcaggagccagcgtcccagaattaccttctgctggttgccgccggagagctgtttgataggagtctccctgtcggctgtcttgatttgaagaatatcaatgtatttatccgtgaattcctcctgttccttcctgctcatgagcctgaacatgcctttcttggcctggagggcaatgatgatattttcgcgcacagacagatccgcgatgatcccctcctccttacggttctcaggcagataggccatgccttccatcatggcgtcaatgggagcgttgacctttaacttcttccccttaacggccagctcgccgctgtccggcttatcggcgccgtatatggcgcggaccagctcggaacgtccagatcccagaagccctgtaaggccgatgacctcgcctttatgtatatccaggctgaagggtttgatggttcccttgtggcccagccccctggcgcttatgattacatcttccttaaccgtggacacgccctccttcttgatggctgccagatcgtcgaaatccttacccatcatcttggccaccagctgtaccctcggcagctcctccaccttgaattctcccaccagggttccgtttctaagaaccgtaatcctgtcgcagacagcatatacctgttccaggaaatgggtgacaaagatgattccgattcccttgtccttaagctgtctcatcagcacaaacagcttctccacctcaccgtcgtccagggaggatgtgggttcatccagaatcagcaccttggccgacatatccaccgccctggcaatggcaatcatctgctggatggcaatggaatagttctccacagccatggtcacatcaatgtggacatccagtccctccaacagcttcctggcatcctccttcatggtcctccagtcaatcatgggaccttttttcggttctctgccaatataaaggttctctgccactgacagattgggacacaggttcacctcctggtaaactgtgctgatgccattttcctgtgcttcctggggcgaccggttgatgatggtattggatgaaccttccattcggattgtaccggtctcaaactcctccacgccggtcagcaccttgatcagtgtagacttcccggcaccattctcgcccataagggcatggatttcgccttttctcaaagtaaaatccacatcctgcagcgcctttacaccggggaaattcttgttgattccccgcatttccaaaacaacgttctgctccatgcgatttccgcctttctaccgttatacgccccatttccagggctcagttactagaacacatccagcctcaggcttgaaaagggggagagccgtgcaacgactctccccaccgcctttcctgaactgttacgaaaatgttgattaataagcacgctcagccttgatagactctaaatccatggatgtatcgaagtaagcttcgtctacatactgaatcttctcaacggtctcgcccttctccagcttcttgatgatctcatctacacgcggtccgtgtaatgggttgcactcaaatgctgcgtttaagtcgccggctatcatggcgtcaaatgctgccttaactgcgtcgaaggagaagatgatgatgtcgccgtcaggtccgcaggtcttgccggctgccttgattgcgtcgatagcgccgaatgccatgttgtcgttctcagctactaccacatcaatatcgtcataggacttaaggaaggattccataacttcctggcccttagcctgtgtgaattcacctgtctgcatatctaacattttccagttgtcatgctgctttaagatgtttccgaaaccttctgtacggccaacctgagcggatgctccgatggttccctgaagagtaacgatgttgatgtcctcgccgtctcttccctgtgcctttaagtaatcagccagccagtttcctgctgtctcgccttccttgatgaagttgccgcctacccagcactcatacaggctttcatccacgtccatctgacggtcggacaggataaccggaatgcctgcttcctgtgcttcctggagaactgcttcccaacctgtctcaacaacgggagccactacgatgtagtcaacatcctgctggataaagcttctgatggccttaatctggttctcctgtttctgctgtgcgtcgtcaaaaatcagcttgtagccgttttcctctgtaaaggtggacttgaaggactctgtattagctgttctccagtcagactcagcgccaacctgggcgtagccaaccacaatcaaatcaccggatgcagcgtcatcctttgcctctgtctcagcctctgacttctcaggagccgccgtggtgtcggctgctgctgccgttgtctcagctgctgcgggagctgctgttgtctctgcaggcttatttccgccgccgcaccctgccagcagggatgctgccattgctgcacataacataacgcttaatccttttttcctcataatacgtaaacctccttgatttgtattttgtttccccttgttggtataatcatatcagttgttaataacaaaaacaacggaatttctccgttgttttgtacacgatttttagaatttttacagtttgttcatacatttgggtgtttttttacgattatggttggatatttttcaatcctccccttccctgtcatatccggactccagcggaatattcaccacagctcttgtgcccagccccaggacgctcttaaactccaggctgcaccgggaaccatagttcaggcgcaggcgctccgccacattgaaaagcccgaaaccgcccttgggagcaggtccctcctggaaagccaaatctttttcccctctcagcttccgcctgacggcctccatctcctcttctgtcatgccggctccgtcgtcctccacctccagcacagccatgtcctcctttgcgtatccccggacccagatgcgtcccctgccccttttattcttgattccgtggtaaagagcgttctccaccaggggctggagggtaagcttcaggattcttcgttcctccagggatttttcaagggtgacctcataatccataatatcctggtaccggatcttctggatctggagatagcttttgatatggccgatttcctccctcatggtgataaaatcctttccgccgctgagggttgtgcggaaaaattcggacagggaggtaaccatatccaccacagcccggttctgtcccccctctgccagccacacaatggtatccagggtgttgtagaggaaatggggattaatctgttcctggagcagctgcagctccatgacgcggcgctggttctgttcctgccgtatatcctcaatcagccgtccgatttcctccttcatgtggtcaaagcttcccgtaagaattgccagctcatcccctgcctcaatcttggggccggaggtaaagtccccctttgcaaccctctccgtctcattgcagagcttctgtatgggcacggtgacgctcttggttatcctgcggctgagcagaaggctgataatcaggatggacaccagcagcgtcaggctgaccacaatggctgtgtgctcctggctctccagctccttctgtatctcctggacatggagcgtctcatagtatacatactccctgccctgcttttcaatatcagcggtcagtacacggacgccgtaatccagtatttccatgtttttatcatacataccgtggggcaggttgtcctctatctcgtccaccctctgctccagctggtccaggcagtggagcagccagttaatcctggtccggttggccccctccggcgtccgctttaacagctggcggtatgtctttctggcatcgcttatggtctgatgcgggtccttaatctgttcccatccgtagggccggtcctcctccatcagctcatggatggactggtaggtccgcattcctatgacaatgcggtacatgctgtagtccacatcctcccgcaggttggccgtgacactgttggcctgggtgatattggcgatactctgggtgtaggcattgcaaaacttggccaccgtggccataagatagataaccagcaccgccaggggaatgatgatgataaaagtcatcaggttcagacgcttttccaggggcaggcgatccaggatatggttcgtgtcccaatccttcccaatgccctgttccttctcatttgctccgtcctgcccttttttgccggacccggtcctccattttcccgtcatgacccctccctgcttcccgccctgtactccttaggtgtacatccaacggttttcttaaacagatagccgaagtaatgggaatccttatatcccacctcgtacccgatttcagaggtcttaagattagagcacatcagcagctcctttgccttttccatgcgcactcctgtcagaaactccacaaaagtcactcccatctcctggctgaagatggagctgaaatagctgggactgatattgaccctggcagccaccgtgttcagggaaatctcctccttggcgtaattatcatagataaacgccttggcctcatccagaacctgactgtacttgctggctgtctggctgtccctcagggtcatgacctcctcaaaaagcctcaccagcttctctttcagcatgtccagggcacaaccgtccttaagtaccttttccatatccgacaattcccgcgggagacgtcccatgtccagtcccagctgttccagaaatgtgctgacacagagatagcagtccatgacaatgtactggcggaacataaaagactggcagttcttttcccccacattctggaaatactcctccacaaacccggaggcctctcccacggtcccctgtttcagaaaattttccagggtctttctgttcaccttggacgcatccactgaattaatatcaatggtttcccctgttccgtggaccatgccgtccatctggctgtagcttataatccggttcatctccgtgaaaaatctggcggcaaacgccctccccgcctgcagataggaggtctgcaaatcgcccagacggttcacacagcttccgattccgccgaaatactgtatgtccttacaggctccggccatctttcccaggctggcggcacactcgctcattctgcgttccacctcctgctcagactcccccgtgagaacgaaggcccacccctcgtccccgcggtcaaaaaccaggatgtgctgccggccctccatccgttcctcaatcgcctcctggcaggataccacccggtcggaataggcaacggcagatcccataggcatgagcttaaacagcatgagctggtaaaaggaggcggacaaatccatccccacctgttctcccctctccagggcttccttaaaattgacccggcccgtcaccaggtcccgcagaaggcgctggcgttccagcaccgtgttctcagccatctccaggcggtacttatccataagcctggcgtcctcccgctccttctcaatcacattcgccaccttcttcactgcctccagaagcttggcagccgtgatgggcttcagaaggtagtccgtcactccgatgtgaatggcctgcttggcatagtcaaattcattatacccgctgagaataatgattttgattctgggaaattccttcttcaccagttcagagagttccagtccgtccatgaagggcatgcggatatctgttatgaggatgtccggctgcaccttcctgataagcggatatgccagttctccgtcgctggcttcccctgcgaattccagcccttccttctcccatgggatgttgttcttgatgccatttcgcatgacaatctcatcctccacaagaaatacctttatcataatccagttcccccctcttatgtatttttttccataccatccatttgctgtcttacagtataaaatataacacattcattttcaagattcttcctaaaaaagaaaaagcagagacctgtgcgctgtctccgcctttgtttcattttaccggcttactgtttttcccggttcttccggttaatccattccgttgacacatccatggccgcccggcaggcccttgtctggtccagggaattcagcataacaaaatcatggattatggcctggaaccgcagggccgtcacatccacccctgcttcgcgcagcttcccggcataggcctccccctcatccctgagcacatccgcctcgccgttcagtatcatggcatccggcagacccctcagctgctccacggatgccctgaggggagagaccgtaatctgcgccctgtctttctggcagggggcatactggttccagaaccactgcatgcctgcccggtacaggtagtatcccgctgcgaattcattgtaggaacaggtatcaaaacaggcattggtgaccggataatacagcagctgtttctggatgaagggccccttcctgtactttgacataagggtcatggccgcagccatattgcctcctacgctgtcccccgccacggtgaaggttccgggattcatggcatatcccatggacttcacaaggtcgggagccgtacacatgacgctgtagcactgctcaatggcggtggggcagcgcacctcaggcgaacgggagtactcagggaatatcaaaaggcagccagtcctggcagccagctccctcaccagcttttcatgggtgtggaagcttccgaacacccagcctgcgccgtggatataaaagatcacattggccggctggcaggaaacccccggatccaccagccataccggaatggtcccccatcttcctgtattgacccgcaccttgccgacccgggcgggatatttgtacacaggcgtatcctgggccttttccagaaccatccttccctcggcaggcggcagctcaaatataaggggcggtttggaatttgcctgacagacctcctctgccgccggctctaacggtacacaacgtttcatatggaactccttcttgacaaaagtctctactgtcagaatattccagattccacattctgctcacctgttttattgatttgcactattttcttccgccttcttatagcatgtgatatcatggcagcacagcaggcaggcatccttgccgccccagtgtatccgggaggcgtcggccgatgaccagaccttaaggactggattatagacctccatggtgtagtttatcttatcctccacctgcttcatgggacaccgttggcagggcttatcatttttaaaaaacgcttcatgacagctcatgcccagccttgaatccggcgcaagcctgtaggtcttatcgttaataaacagcagttcatgactttccatgtccaccacataaatccatgagttctggtggtccagaatggtccttaagtcctctgccaaatccacggcgctgtcctgtgccctctgcttaaggaggaacagggacagcagctcggacacaaaggagagaacctcgatctggcttatggtccacaggcagtgggaggtacagtcatcaaatcccacccatcccttgaacacgccgttatccctgatggcgcactggagcatggacttgacgcccctttgcttcagccgtctttggatgtcgccgggaagctggcctatatcatcgcagtagagaatcccgctctcattaaagcagctctggtaatctgtactgaactccgcataggaacatccctgcagcaaatccttctgggaccggattccccgggcgcaccactcaaaggtgttgctgtagcaggtcccatcctccgaattctcaaatacataggcgcggctcacctgcagacgctcccccaaaagctccagcacactttcaacggccttgtccatctgctctgacttggacaggatgttaaaggctcttggaagcaggtcatttaacatcatgtccccattctgttccgactcaatggtggtattcacagttgcctttcgccccgctccctggccgaacgccttgtcctccatggactggtcgtagatctggtactgcttttttccgcaggccttggcctggtacagcgccacgtcagcccgccggaacaaagtctggaagttctccccatcccttgggcatacggcaattccgatgctgcatgtaatacagcagtccttgggcagctcctccagcacacgctcaaagcactcgatgagccggccggccacagactttacccgctgttcattgaccactccctgcaaaagggccatgaactcgtcccctccaatcctggagacaatatcgctgctgcgaaacagccgggaaagctgccctgcaatctttgtgagcaccgcatccccaaacatatgcccgtactggtcattgaccatcttaaaattgtcaatatcaatgacgaacagcgcagccccttccccttcctcccggttcaccagcaggtgttcgattctctgcctggctgattccttgttgtacagcctggtcagggtatcacgctccgcccgtgcctttaactcctgggcggcaagcttttcatcatttatgtcaataacgattcccactgccttgcagggctgtccctggtcgtcaaactgggtggtggccctcagcttgcaccactgatagcggcccttggaatcagacaccctgaactccagctcaccataccgccttccgtcccgtatctcttcgataagatgtccgaatggcgccatatcctccggatacagatgggatatcttaggtatccgtaccgatgcctgctctgagatggggtcatatccgaacttggccttccagttgatggagtataccactgtgtcagaaccgatgtcccattcaaagaaaatatcattggtctgttccataacgattttataccgttccagtcccaggcgcagctcctcctgggcatgtttggtctggtcaatgtctatgattacgctgtaaaaatattccctgccctcgttatcatacatcagacgccccttgtccagcatccagatgctgcggccgctgcggtcctccacccggtattccacttcatattccccgccccggttgatctgttctgtcagctccctgcgcatccgctccctgtcatccgggcgtatcatttctatataacagttgttgaaccgctcttttatctcctccctggtatatccgaggaacccgtcgtcaacatccatcatggtgaaccacctgtcattgcggcagcgcaggattcccttcaatatgttgtgaagaacccggcggtcctcacggagcctgttttcgtccgaatccgcctccggatgcgctctgtccacgagccgccacagcagcaatgcctttcggcggcggggatgttcgatgtccacccgcagaagggtcagctcataccactcctcagatctgtgctcatccttcagccggtacttccagctctgtttcagcattccctcttcaaagaaacgcggtatctctgttttccatatccgccgcacattgtcctgttcctccggcaccaccaaatcatttatgcagcattccgccacggcttccaggcattctccctgaaacagcttcttaatccgctcgtccggcgcgtataccacatgatagctgcccgtggaaaagtccacctcagccaccgtggtatccacataccgcagcatggcaaaatacttcatctgttccagctgcagggcgctcaggctgccgtctcccacccccaggacactgccgtggtgggaaagctttgcaggcgcagggacattgccgtcccggtaccgtttgcacaggtcagccagctgcggctccacattcttaaagcagtccagcagtctggaggaaaagcatccgcattcaccgttcagaatcatgttgaaggcctgttcatggggaatcgccttcttataaacacggtccgacgtgagggcatcgtatgcatccacaatggacacggcctgggcgcagatagggatggcatctccgtacagcctatccggatatcccctgccgtcccagcgctcatgatggtaccggcagatgttgtaggcgtattcaagataccccttatcgctcatgcgttccaggccctccagaatctggcatcccctgagtgtatgggtcttcatgatttcaaactcttccgcagtgaggcggcccggtttattaagtatcttatcctcaatggcaatcttgccgatatcgtgaagggccgaggccgaggcaatgacttcaatctttttcttatccagcccgtattcaggacaattcctgcacacctcctccaaaagcacctgggtcagcagacggatgcgcttgatatgctgccccgactccagactcctgtattcaatgacagatgaaagggcgtccaccagcacatcgttggactccctcagcttctgcgcctgctgctctaccatgtcctccagattatgtttgtgaagataaagctctatgatattatgtacccgccgcttgaccacatggggctcaaagggcttgactatgatgtcggacgcccccaggtcaaaggccctcagctccccttccagggagttatcagccgtgattaccaccacaggaacctcgtccagaagcccgttggcacccatctcctgcagcaccttgtatccatccatcacgggcatcaccacatccagcagcatgatggctatattctcgtgatactgccgcagcagaagcagggcctgctccccattctcagcctccagcagatggtattcctcctggaacagtccatccagaatcacgcggtttatttccatatcgtctacaatcagtatggtatcccgctgacgcatatcgtcacttcctctccgcagccgtaagacacaagctgccgctagtcatttgcaagtattctgcatatctccttgtaagcctcttccagctccggatatgcttcggcagcttcatcaaaacggtctgccctgatatggtccaccataaaagaggatatgttaaacagcttatccatacccagattggccgtaacacccttaaaggtatgggttgccatcggggcatcctcccggttctctccctcaaaggcctttgtgatctgggaaaaagtactgtctgtcagaaacttcttcagaaacttctcgtacagtgcggaattgccgctgaaacgccgtaaggcgccatctatatccacccctgcgccctttaattcaagtattgtatttaaatccatgaaaatccccctcattccggttctggtcacagaaaccgttcttaaatgaaaatgacgaaaaaaatataacatattgtataaattatagcaggttgaggatatttgtgcaacgatatgaggaaattacagaacaagtgcggaacaagcggaagtttatgagaaacaaaaaaggaaccctgcctggaaggattcctttttctaaaatgcgggagatgggacttgaacccacacgagcatacacccacaagatccttagtcttgcctgtctgccaattccagcactcccgcaacacgaatggtagtatagcatagatttttcgacttggcaaccatttttgacaaatttttttaatttttttcaaaaatcaaattcgataaaaaatttaaaaaataatattgacaaatcgctgctgctcatttataataaccttcgttgcttgaacaaagcagcagaacaaaacaaaatgcagaagtggcggaattggcagacgcgcacggttcaggtccgtgtggtagtaataccttgtgggttcgactcccatcttctgcaggcagaaaacaggaatttccagtatggagattcctgtttttatgttcattttttctgcagcagaccggcccggcaccagacagtccggcaccgccggcacatccggtccttctccggcccagcagccggccgcctattccccatcctgttcaggaacatacggacatgtagttctgcgcacaatcaatgtagggtcaagtatcacccgttccggcttttcctgtgggtttttcagctgttttaacatcagtctggcggcatgctcgctcatctccctgacatgctggctcaccgttgtcaagctgatgtcatagagtgatgaaaaaacaatattgtcgaaactcaccacggaaatctgttccggaatcttgactccggactcccggcagtgctcaacaaacccaatggccatcatatcgttggaaatcacgattccctttggacggttcttcaaatccgatatataaatctttgccagttcacttcccgtgtccagcttcaaatcacccttgaatacattttgttccttaaaggggagacggtaattttccagtgcctgcctgtatcccctgaaccgctgctccgatgcggacgaaacatccggcccctttacaaaggcaatctccggataccccagctcaatgagatgcatggccgcaatataaccggccttgaaattgtccgacagcaccgaatccccttcataggaccccaggatcctgtttaccagcacaaccggaatctcaatatcatctaattccttttcaatctcctctgattgggcagtaagcaaaaatacacctgaaaaattaaattggatagccatatgaatgaactctttttcccgcctgatatcgtattcactgttcaggaccatcagcatatatccattgttgtgaagaatcttctggatgtaaaaggtaagatccgcataaaacggattgcggatgtcgctgacaatcagagcaatgatgctttgtctgcccttgctcagacttctggctattgtatttggctgataacctatctcctccacaaaatccagcacctttttgcgcagctcctccccgactcccggcgagttattcatggctctggaaatagtggaacgcgatacccccagcatctgggccacgtcggaaatggtatacttatcttttttctggatactcattctcttacttccttatctgctttgaaataacatggctgtgatccacctatcccaataagcgtcttgctattattataatataagtaaaaatgtaatgcaatcggtattgcgagaaacgaaaaaggaggagcagcccccagctgttccccctttcgcccgtcatccttaattgaacggcgccggataaatggtatcgtgttttgcaatatcaaacggccatacagtaacaagcgaaccatcctggaactgagcgattgtcagcttgccgtccatattggtattcttataaggaataccgttaaattcagactcggagaacttgatagtgtcataaggaagaataatctcctcgcctcccgggaaggcatctttaatctccagagtactcagctcatcctttaatgcttcagaggtaatctccttgcctgcgtctgcaagattctgaagagctgtcctgaaaatccagactaccgtgtacgcctccgcggaatgcccgttcatatcaacgccgtactttgccttaaacgcgtccgaaaccttggttcccttgtcccccggcaggaattccgtggctgtaaggattccgtttgcaaggcctcccacagacggaagataagaggattccgtataaccgtttgccttggcaatcatgatattgggcttgtacccctgctcgttcatggtctttgtaaggagaatcgcgtccgatacataattgtcaacaataagggcgtccggattcagggactttaactgcagcacctcgctggtcaaatccgccgcgccctgggagtaaagaacctctcccttaaattccaggccgttctcttctgcaaagtattttgcccaggtggctgtctgctgtcctaattcagtattgtccgcgcagaccgcaacactcttgacgtcgatatcatctgccggatccttggccgacaaatccagaagatactgctccatatcacgtataaacatcatattggttggagccaggcggaagaaatactcatatccgtgagatgtaagggaatccgacgtggcattggctgttatcatgggcacctggtagttttccgccacctgggacaccacctcggtaacaccgctctgatatgcgcccattaccgccatcaccttatcctgtgtaatcaaacgttccatctcagtcatgcccgtggcattggccccctgggtatcaccgtatacaatctggataggccggccacttattcctcctgccgcgttgatttcctccactgccaggtcaataccgtccttcatgttctgtcccgaatcagccagcgctcccgtcatgggataaagcgcgccaatcagtatgggctccccatctgcggtggatgcctttgccggctccgccgtcccgtcactgcctgcagccgcggtcgaggccgccgctgccgttcctgctgcctctgccgtatccttctgtcctcctgaaccagaaccatatcccccgcatccggacagcatacccgctgccatagccgcgcttaatgtcaatgccaccaattgtttcctcatgtatttctcctccttttatttgattaacccatatacgggccatctttcatttttagtttgtttccgcggcagcaggaacacagctgccaaccgcgctctaaaatcccagatacgcctttttcacctcatcgttgttcaaaagctcttcggctgtgcccgatacggtaatctggccgttttcaatcacgtatcccctgttggcaatcctcagcgccttcctcacatcctgttccaccaggataatggtaagcccggattcctgcgccacctctttggcaatggaaaatatgttgtccacgatgttgggggccagtcccagggaaggttcatccataataagaagcttcggaagtcccatcatgcctctggaaaaggcaagcatctgctgttcgcctccgcttaaggtgcctgccagctggttctttctgtccttcagcttaggaaaccagttatagatccgttcaatggtgtccttcttagccgctttcgccgccttgctgctggctcccatctccagattctcatagattgtcatggaaggaaacagctgcctgccctccggaaccaggataaccccgtggtcaataaaggttctgcaagccgctccggtaagatcatgtccgtccaaacggatatttccctgaaagggcctgatcaggccggcgcaggacttaaccgtggtgctcttgcccgccccgttgcttcccaccagggctacgatttcccctttatccgccgtaaattcaatatcccaaagcacctgaatgtccccgtaccggacattgattttatttacctcaaaatacctgtctgccatatcaatgctcctccttaccaagataaatctcgatgacataggggtcattcattaccatctccggcgttccctctgttattttctcaccatgatgcatgacaaccactttctggcagagattggccactgctctcattacatgctcaatcagcagtatggtggtcccgttctcattgattttacgaatcagctccaccgcctcatctgtctccgtgggatttaagccagccataacctcatccaaaagcagcatatcaggatccgtggccagggccctggccagctccagacgcttcttaaagggagtgcccatttctcccggcagccagtccttccgctcgtacaatccggtaaaatgcaggatttcctctgcgtattcctttgcctcttttactgatttatatttttttcttccatatagagcacccgaagcaacattatccaatacagacatggaagccagaggcttcatgatctggaatgtcctggcaattcccatggacgtatagtgatatggcttcatgccggtaatttctttgtttttatagataatatggccggccgtaggcgggaacacgccgcttatcatattgaataccgttgtctttccggctccgttggaaccgatgagcccggtaatgccgccctcctccacagcaaagctgacactgtccacagccttcagtcctttgaaattcttactcaaatcctttatttccaatatattgcccacttaaaacgcctcctctcctgatttactttttaccgtccatcctgtcaaacatatcattgacctttaccttgaatttgctgccgttataccagcccataatacctcttggctggaacaggataaccacaatcagaatgatggcgtaaaccagcagattggctccgggcgctatactgctcagggtagagttgagatactgagctaacggtgtaagaataatagctccaatcagggggcctgtcacgcttccgattcctccgattactgccggaagaacgaattccacggactgtgcctgaatcatgatatccgggttaatgaaacggatataatttgcatagaacacaccgcatacagcaatcaggccgcagctgacaaaggtggccagcaccttatatttgagaggattgattccgattgcattggctgtgtcctcatcctccctcactgtctttaaggcatatccaaacttggaacggtcaattgcgcgcacaatcagatataccgctattaccataagaagggacagataaaaatagggcactttactcttaaatcgcagcagagccagggaattatcgccaaagggaagcaaaagcccctgccccttgccggcaaaatcccagttggtcatcagattgcggaacgcctctccaaacgcaatggtaaccagtgaaaaatacggccccctcagcacgaaacagggcgacagcagcaatgcggttaacgctcccacaaacaaaaacaccagaggaatgctgatccacggcgatacattcagcttaaccagcaaaagagtggacatatatgcgcccagccccataaaggaggcatgtcccagggaaatctggcctgtcagcccgcccaggatactccaggccagggacgcgctggccatgtaaaatgtcatcacgcaaatcgacagcaggtacggtgtacggacaaatacgggtatcacagctgcgattagaagtaaaatcaataataaaatctgtctggaacctatttttttcttcattgctatctacccccgtcttgttttcactgtctgtttcactaccagaatcaatataaatgccaggaacacgatggtatccttaaaggaggaacccacaaccacggctcccacggtttccataagtcccaatacaatgccgctgacaaaggctccgataacacttcccagtcctcccatggttaccacaatgaaggacctcgtcccatacacggcgccaaccgtagggaatacataataaaaggacatcagacaggctccggtgattccggcaatggcagctcccagaccgtatgtagtggcatagaccagctttgttttgataccgcagacctgggctccggtactgttctgggaagtggcgcgaatctgctttcctatattggtatactttaagaaagcaaacaaaaggatggttaccgccagaagaatcacaaagctcagcaccttgggaaggcttaagtttatggctcccagctgcacgattttctcggaaaacatactctgggccgttctgtaatccgatttaaaataaagaagcgctacattctggaacagaattcccagtccaaccgttaaaaacagcacattggtatcgtcattgccgtgcagggaccgcgtaatcagcgttgactgcaaaagcgccccaaaggcgaacatcaccaccgccacaatggggattgccacaaagggatcaagaccgcattggtcaaacagaacaaaggatatgtacatacccagcatcagcagctcgccctggcaaaaattgataatcttcataactccgaaaatcagcgtcaggctcatacctatcagtgcataaattccgcccaccataatcccattggcagccgcctgcaaaaatatattcatgttactacctcccaactaatttgataacagctccgtgttcacgaacacgtttccacccgtttctaccttcccaaaaaacctccgtctaccggtataactgccccggatatataagcagaggcatcggaagccaaaaacactgccagccccttaagatcctccgcagtcccccatcttcccatgggtatcctgcgggtggtttcctcgtattgggcaggattctttaccttcatggtatctgtcagcgccgtggccatgtatccaggggcaatggcattgacattgattccttctgccgcccactcatttgataatgcttttgtcagctgggcaaccccgcctttgctggcactgtaggccggaaccagaacactgccaaaaaaggaatccatggatgctatgttgataatctttccgtaacggcgggccgccatagaccttccaattctctgagacatgaagaacacagcgttcagattaagctccaccacttcattccaatcctcctgcgtcacctcaaaagcggcacacctgtttaatgttccggccgcattaaccaggatatcaacacgtccattgtaaatctccaaaatctgctcacagaccgtttcccgctgctgctgcctgcttaaatctcctgtcactccataagccggaggtccgctgcttcctatttctgcggcagcttcccacaccttcccggtcctgccggttatgattacctctgcacctgaatcgtgcagcgcctgggcaattccatatcccagtccacggctgcctcctgtgacaaccgcccggcgtccttctaaatcaagtatcattatcttccatcttccccctttctttccctgtatctcaacgaatcaatcccctccttttgcatcatacagtttgtgtccgccaatcgtaattagcgaatcagtttcgtaatgtttcgttctttttagaaaacagtttcgttacgttgttccaagcatagcacacggtttcgttaaaatcaataagtttattcttgttttcctcttgttttaatgcttttttacttttttgacaaattttcagtatatatattgtctatttttcaaaaattgtttattttttatcaatgtaattgtgcatatggtcagattttacccgttttaaatctggctcgcctcttcactaaatgtacaatatgcataatattttttacatatttttatatcacattgtctctattataatagaatgccaaaaataaacatatttttgttattgactattgaatcattttcgtttactattagccttaaagaacgaaatcggtttctctaatacacgggggtattaattatgattaacggaacaactctttggaatcgctcttatactgcagatatgatagaaaagaccttttccggtaagacttatttgacctatcccaatcttcctgccaatttatacgacgccttatccttatctgccgcacgccatccggacaagacagcagttgtggatgacagcggcgctacttatacctatacagaactaagggacatggccgaccatttttcttcttacctatattacatatcggatatcaagccgggaaccaagacaggcatcatgatgttcaacagcgttgaattctgcgtgaccttcctggctcttacaaaactgggagccgtggtaataccgctccccagcaaatacagccggaacgaagtgctttcactgacagcaaaggccgatctccagtacatcctgtgtgatgaaaaattttatgactggttcgtaccgctggaaacctccggcgtccatctgatgaagcccggacggagtcaggacggatttggtttttcccacctgtgcgcctcctatctcagccccgttccctcccttggcagggaggaggatgacgcgctcatcatgtttacatccggcaccacctcccagagcaagggagtcattatcaaaaattacagcatcatgcacgccattgtctcctaccagagaattttccagataacggaccgggacaccacccttattcccatccccatttacctggtaaccgggctggtggcgcttctgggactgaccctgtatgcaggcggaaccgtttacctgcacaagttctttgatgccaaacggattctcagggatgtaaacgacaaggaaatcacatttctccacgccgcaccggccgtattttccctgctgctgagggaaaaggacagttttccttccctgcccagtctgaggcttctggcctgcggaagcagcaacatgtcaaaggaaaaactgacagaaatccaccgctggctgccctgcgccgtatttcacactgtatacgggctgaccgagacatgttcgcctgccaccatctttccgggcgatgcttccaccagcagttacattggttcctcgggccttcccattcccggcacctgcttttgtatactggatgactcaggttcacagatgcagacaggccaggtaggggaaatcgcagtcagggggacggttctcctggaccggtattatcaaaagggaaccggggagctggacggagactgctggctccgtaccggagatctgggatattttaacggggaggggtatctgtttatcgtggaccggaaaaaggacatgataaaccggggcggagaaaaaatatggagctttgatgttgaaaatgagctgtacaggctggacgggattgatgaggcggctgtggtggggattccccacgatatctacggcgaagtgcctgtggccgcggtgaagctgtctcctgaaagcattctgacggaacagcagatacaggatttgctgaaatgcaggattgccaaatacatgattccttcccgcattcttttcctgaacgagctccctctcacgcccaataacaaagtaaataaatcagccatacggaaacttttcatgcagccagaacagtaaggaggttacacaaaaatgagaaaaccagtttttatcaccggcgaagaagccgctgccatgattgccgacaacgcaaccgtggcaaccatcggcatgaccctggtgtcggcagccgaaaccattctcaaagccattgaacagcgctttttagagacaggaagtcccagagggctgactctggtccattcctgcgggcagagcgaccgagaccgaggtatccagcattttgcccatgagaccatgctctccagaatcatcgggggccactggggactgcagcccagaatgatgcagctgattgcggacaacaagattctggcctactgcattccccagggccagtttgcccagttataccgcagcatggccggaggcgagcccggaaaaatcaccaaggtgggcctgggcaccttcatcgaccccaggattgacggaggcaaaatgaacgaaatcaccatgagcgctcccgatatcaatgaggtggttaccatcggcggcgaggaatatatgcgctataaacccatccctctggattactgcatcatccggggaacctatgtggatgaatacggcaatctgaccacagacgaggaggccatgcagctggaagtgttctccgccgtcatggcatgcaaaaaattcggcggaaaggtgctggcccaggcaaagtataaagtcagggccggttccctccactgcaaacgcgtgattgtgccaggggtattcattgatgcggttgtcatctgtcccaatcccgaagaggaccacaggcagacccacagtttctatatggaccctgcctactgcggagataccaaggcgcctgtatcatccgacgacgtcctccccatctcgctgcgcaaggttatcgggcgcagggcattgatggagctggcgcccgatgatgtgctgaatgtgggaaccgggattcccaatgatgtcgtcggccccattatcacagaggaggggatgtcggaggatgtgaccataaccgtggaatccggtatctacggtggcattcccatgggcggtatcgactttggaattgccaggaaccagtttgccctggtacggcacgacgaccagtttgactattataacggacccggtgtggatgtcacctacatgggtgcaggcgaggtggacgccgagggaaatgtcaatgccacccgtttagggccaaagcccacgggagcaggcggttttattgatattaccaccaatgccaagcacgtggtcttctgctcctcttttaccgccaaaggactggactgctcctttgaaggaggaaggcttcatatcaaccaggagggctctttaattaaatttgtcagccggattaaacaggtttcctataacggcagaatcgccagagaaaagggccagaaaatgcactatgtaacggaacgggccgtatttgagcttcgtccggagggactgaccctgaccgaaatcgcccccggaattgatatccagacccaggtcctggacctgatggaattcactcccctgatcagccctgatctgaaggagatggatacagccattttcatggagggtgctcccttcggacttagaaagtatatattttctaattaatacgcagcagttcgggacggtcaggatgagactccgtcctgaacagttccaataacatattcacattaaggaggattaatcatgagactcgaaaacaaaaccgcaattgtaacaggtgccggccgcggcctcggcaaagggattgccttaaaactggcagcagaaggcgccaaggtcatcgtagccgacatgtcaatggaaacagcctctgcaactgctgaggaaatcaacgcttccggcggcacagccaaggcctttgccgtcaatatcgccaagcaggacgaggtaaaggcaatgatggactttaccgtggagtctttcggcacattggatgttattgtcaacaacgccggaatcaaccgcgacgccatgctgcacaagatgactgtggagcagtgggagcaggtcattgcggttaacctgaccggcacattctactgcgtccagtatgctgcccagattatgagggaaaagggaagcggcgccatcatcaacatctcctccgccagctggctggggaatatcggacaggccaattatgccgcctccaaagccggcgtggtgggcctcaccaagacagcatgccgcgagctggcaagaaagggcgtcacctgcaatgccatctgccccggttttatcgacacggacatgacccgcggcgtacctgaaaaggtatgggataccatgataagcaagatacctatgggaagggccggcagccctgcggacgtagccaatatggttgctttcctggcttctgacgaggcaaactacattacaggcgaagtaatcaacgtgggcggcggtatgattctttaatgatataaaatgaggaggatacggatatggagaatttaaaagaagtagtaattgtcagcggagtccggcttcccgtcggctctttcggcggaagcctcaaggatatttccgccattgatatgggcgccatggttgtaaaagaggccgtgaagcgtgccggtatagagccctctgatgtagatgagactattgtgggccaggtgggccagattgcggaatgcggttttgtagccagagccgtcagcctgaaggccggacttcccgaaacaacatgcgcctattccgtcaaccgccagtgcggctcaggccttcaggccattgccgacgcagtgatggagatacagacagggtttgcagacgtggtggttgctgcgggcaccgagaacatttcccagctcccctactatgtgaaggacgcccgctggggtgccaggatgggacacaaggtgtttgaagacggcgtcattgatatattgacctggcccttaggcccctaccacaatggcgtgacagctgaaaatgtagcagaaaaatacaatgtgacccgccaggagcaggaccagtatgccctggaaagccacctgagggcagcggcagccatcgaagccggtaagttcaaagacgaaatcctcccggtggaattaaaggacagaaaaggaaacatcactgtctttgacactgacgaaggccccagagccagccagaccatagaaaagctggagcgcttaaaaccatgttttgtgaaggacggaaccgtgactgcgggcaattcctccagtctgaacgacggcgctgccgctgtggttgtcatgtccagggaaaaggcagacgccctgggcgtcaagcctctccttaccattaagggctgcacggttgccggcaacgacggagccgtcatgggatacgctcccaagctctccagtgaaaagctggcagcgaaactgggattggaccttaaggccattgatatgtttgaaatcaacgaggcttttgcaagccaggcctttgccgtacggcgcgacctgggactggaccccgaaaaagtaaatatttacggcggaggaatctccatcggccatcccatcggagcaaccggtgttatcctggccgtgaaggtactttatgaactgcagcggaccgataaaaaggacgccatggtaagcatgtgtattggcggcgggcagggaatctccatgtactttacaaaagactgatactagaaattaaaaccggagctgaaatctgtgttagaggatttcagctccggtttgttttgaaccgcagtaaaaatgttactatattcaatgttactatatctaatgttactatatctaatgatcaaatcacctgaacatctgcagataataccagggaggaaacagcctccccacctggtccagtcccggaaagaacctccctgcatccacaaaaacaggacagaacacaaggcttccgataaccaggaagggtatgatgcagcagagaacctggggcctgcggcacaccaggcgcagaatccaggccgatgctatgacaacacagcagtaaccggccatggccgcagcctctcttggaaaggatgtcatcacgccgcccgcccacaaggccagaagccctgatatgctgaccatgacggcaggagccgccatggaagccacacggcagggtatcctgtatccgtatgaaaggggaagaaataatcccctctcctcatcgccgcacatgaccacagctccatacagcccggtaatgaacacgtaaacagccaccaggcccctgaccggaaagacatctgtccggctgctggcaacatctatttcctctccatccctgccctgaaactggtattcaaaccggaaggtggaaccactctccagccattttgtgtaaagctcccgggcctgtacggctgcttcctctctggcttcgccgcctggtgctcccagagggtcaaacagttcattttcagccacataatccgccagcaatttcccatcgtatatcttcataagggctgcaaacacggtctccgtggagagagacgaagccacggtggacggcgccgaatatacgccgatagaacgcttataggatttggtatccagcttctcctccagtccggcatatatcacataaccgcattccgcccgccgggacgccacttctgcctttacctcttcctcgtcacggcacagatagaaacggaacattcccgcatcctctcctctcggccggttcacaaggctgtccgccagggcatcacccagggagttctccccgctctcttccacactgatggctatacttatgtcctggcttccctttttctgggcctggccggctgccagcaccccggcaggaaggagcaggaggatgaaaagaaaggaccattttctcatatatcgcttgcatgacagaaaaaaccacatagcgacccgcttcattccctgaccacctccgctcccacgctgagcagaaacccggccatggccaggactgccagctttataaatactgccaggctaaaagaagatgtgaccaccagcttcatcccctccatcagcacataggtgggcagaaacggcgctgcagcccggaaggtggtgggcaggaataccaggggaagaaatcccccggacaaaaagtgcatggcagtcaccgccagaaacagcagcatgacaccgcccatcaggcttccggccgcctggtagaggaacaccaccagggacgcggcccccaggcagaccatcaccagggctgccagcccgggcaggctgaattctatcagccccgcaaaagacgctcccagagccgtacacagggccaccgacagaaacagcatccccacccctaaaatcctggctgcaaccagagtccccttccccactcctataagggccagctgacccttcatggacgcagatccggaggcaagataggctgatacgggaatggcacagagaagcagaaacagcacagccgtgctgatgccgtaaaagtgaatcgtatccacgtcccctgtggcgctgacccttacattcttaaagtaatccatgcgcggcaggctgtaacccatataaatccggttcaggtccgcctccaggctgctcaccgaatccgccatgccgtaaaggtacagcagttcgtcccccgcgtagattcccgcctggctggctcccagagtagaggcgcccgcatcagtcagttctttgaaaatgcggctttccagacccgctccttttggcagcagaattttcaccggagtattggttccattcataatatcctgcacaaatccctccggcacctccatcactgcgtacagttttcctgctttcagcttatccaggcattcttctttattcatatattcaaaatcgcagatgctcttgacgctttccagcgaactgaccatggccagtgccttcttcgccacagcatctccttcaggaagcactacccctacggtaatcctccccgccgatgtttccccatacagcatcctggctgacaaaagggcaatcgtacccgctaaaagtaacagcacgattgcccctgcaaagatgtggggaagctttttacatgctcgtttcaactcaagcctgagataaaccagacgtgcagacatatcttcccattccttttatcttattaatacatggatactcccatctggctgcctaatcccatgacgccaaacagcatttccatccctacattggtccaatcctcttccgtggcagacagcacatccatggtctcgccctctaaaggactgatttcgccttccagcggctgatagtagtattcaccgctgagaaccacattcacggaatcatccataatggatgtctccagagaatcaatgttcacatggacggattttcccttttccagctggtccactgcgccttcagcggaaatcttcacaagctgtgagccatttcctcctacctcgcctgacaggtggtagcttccatccttggaatcatatgtactggtgtatgtaaagttataggtctcatcaccgggaacagtcaaatccagggaaaggtcgctggtcagcacgcttttatcgtagcttccctgcttcaccatatcaatgctcaccgtatccgtggcatcctccagcgtaatgctggccagggcattctgagtcagataggcgccgccctgaagctggcagctaaaggtcagtgcaatatatccctcttcagaaacatctgtatcctcaacatagagattggtggagccttccactgctgccaggcgtcccttcttatccacataaaccgtcatgtttacatcagtcagcgccttgtccagatattctatcatctggtccaccattttctttgcctcctcgtaggactgctgctgcatctcctccgcggacatggttccggtccctgacatggttcctcccataagctcgctcatcttaacagtggtctccagctgacgcataaaatctgctttcagggtctcgtcctgaaggaagaaatcagaagactggcgaaggaattcaatcatggaatccttgctgacagtcacattatatcccttgcagcttacctgggcgccgtctatggtgtaggttcccttagcggccttttcaactgtcagggcagccttgaaattctcctgggccttgcatccttctttataacggttaatcagcgcctccacgtcaaagggctgtctgccttctgtctgtgctttttcagcctcgtccatcagctctgtgaaataaacagccatgccttctacatccacgccgttctgctccagcagaggtcccacggtaggcgaattcttaatacggtctgccagtccttctcccaggtccacggtaaacaccttggcggacagctccggaaccgcaagcatcagggtatcatccccgtaatatgcgttcagattggcaaggtccattccgctgtagataactcccatgttgaagaagctcctgccgttggtcttgtcgtcctttgcctcaaagcgcaggccgcttcctgcataagcattgactgtcgcatccgagcagctgtccatcttaagtgtcaggccgccctggctgtctgctgtcttcactgtctcagcaaagtccttcaggccgaacagctcctcagaagggtaaacctgtccttccgggaatacattttcaaaagcgtcaatgaccacctgctttggatcctttgtggtcatcttcacataggccagcgctgcaacggcaatgacagcggcaaaggcgatgaccgcagccaatatcttgataaacttcttatttggctggggctcttccggcacagtcactgctgccggatccggttcctctgcttttactgcctctgcttcggccgccggttcctctgcttttactgcctctgcttcgtccgccggttcctctgcttttactgtctccgcaccggatgccggttcttccgtctttactgcctccgcaccggatgccggttcttccgactttactgcctccacaccggacgccggttccttgtctgccggctccgggccgttgttttccggtgtctgatcctcatgttccatcggagccccgcactgggtacagaatttcacatctgcttcctgctctgctccacacttggtacatttcatatttctctctcctcccttgtaaaaggatccttccgctgccttaaatgctgctgcggctgtccttttgttatgaatctatcgaaattggctaatcagctcttttgccgacagtccacattcgatttcccttaaaactccgccttttagtatgcacatcctggtacacaaggccagctccgccagctcatgggacgtcagtataacagccccgcccgaagccatatattccctgagataattccggataatttccttacactccaaatccagggcagcccccggctcatccataataagaacaggagcatggttggacagggcacatgctatgctgagccgcttcttcatcccgccggaaagctttcccgctgtacgatccagcatgcggtccacacccagcatggaagctgctccgtcctttaaatccgattccatctgctttctgcttcccctgtaccacaatagcaggttgtcccttactgtcagttcctccataagaggattctcctggggcacataagccgcctcctccgcaaatacccgcggatggcccgacgcctccctgccattatataagatactgccccggtccgctttctgggcacctgccagaatggacaaaagagtcgtcttgccgcagccgttataccccacaatgcccacacattctcccggagccactgtcaggtccgctcccgctaaaatattctgtctgtgataggacttataaattcctgatatctccagcatcgccgcaatcactcccgtaaaaacaatatatgatacaggactcagtgtaccatatattgggagggaatgcaaaataataattattaacgattccttaactatgccataatgacagtaacgttttttcgttgttttcaacgttatctgtaatgtttctgtaatgtttttttaatgtttctgtatcgggtacgcaggcaaattcacagctggcaatatgtggatttggcggaaaaaccaaatgcaaaatcggaaaggaaccttctcctgaatattttccgccaatcatacaaaaactacgatggacaggaggtatcaccatggcaaaagcaggaatgagaaggcccagcccttacgacgctgataatcacggaaccgagaaccaccacaaaatgaaccatcccaaaaatgagcaggcccaggttcccgaaatccagggggctgccaaaaacggaaacgccaaggcaggccctatcaatgctcccaactgggcaagagatgattataaaacaggagagcattaaaggtatggaaaggcgggcctggccacatccggcgcccgcctgtatcaaatcaaagtttcattttttgttcatagcatcacccatacggtttacagtcatcccatttaacctaatgctcccagctccgccgctctgtacagcgccgccacatgtacggcctgttctaccccgccttccctcagcaaacgcttcacttcctccccctccaactccactacctccaaggcctctgtctcatccagattctggggtgcggccgggaatacattcctggccaggtagcactgggcatagctggtgcagttgctggcattcggggcgattttgaagaggaattccagactccctgccttgtatccggtttcctccagcagttctctggcagcaccgtcctttggatcctctcctgcctcgatgcatcccgccggaagctccagaagcaccttctccacaccgtggcggtactggcgcaccattatcaccctgtgctccggcgttaccgccactaccaccgcaaaatccggcagatgattgacataaaagggggcaatgaccatgccgcccggcagctggcaggtgctggcgcgcatatcaatccatgaatccttaattacagttgtctcatccagtattttccatgaaagattcctattcagtttctcatctttattatccgccttcttcattgtccctctttttctcccttactttcctgcggtctgcctttccatgaacagcctcactgccataacccgtcctccagagccgccatcatcaggaccagatgcagattcatagctgctgtcttgtcgtcaatatagtggacatcccgctccatcttcacccgccccggcagcagttccattgcatcaaacaggtcctttgccgctttccgcgactggtattgtacatatgcatccttaatcattgcccacaacctcctttggttattataacgcttggaggatgctttttcccttatttactgccgggaatccgccgggtataccgcgctttcaccgcactgtttccccgcggacagactgtttcccaccatgccggccacaatcaccgcaattccggccagtcccgccggctccggaactctgtcctttagcagcaggattcctcccagcagggtaaataccacctcaccgcactgggtagcctctatcactgccagatggcgcggattctcttttaccaggtccgtggccttaaagaacaggatcgtggcaataacacctgaaaacagagccacgcacagggactggaatacctgtccgcggcctgccggcccagcttttacccaggcccagccagacatgaaaatccaaaagggcatgctgcacagtgtcatgccgtaaacccgttccagggtggtcatgccggccggacaaagcgccatcattttgcggtttcccaggggataggaaaatgccgccaccagtatgggtgccagcgtaaagaacacagtcctcacctccatccgtttcagatgaggcacctgcatcataaatacgcctgccagtacgagaacagaccaccccaggttccggattggtattctttttccaaataacggcgtcaaaagcacgccagccactatggtcagctgccaggtagccgctgccagccaggattcccccaacacggatccgaaggtaagaggtgcgtaaaacagtccgaaacccaccgtactccataccagccatgagacaggcgcctcttttacggcgctccacaccctgcccgccgaggggctccctgccagcataatccacaatatgggaaatgtaaacagatacctgaggctggccgcccacatccagtatcctccggccagattcatgcttctgttcaggataaaggtaaacgcaaagaaaaaggatgccagaatcccgtatatcagcgctttcttcaactcattctcctcccttttttgaaacagccgcgaaaagtccgtttcaaaaaagagggcactgcagcttgtcctgcaataccctcttgtaatcctatatcaattctaagttaagcaatcttggacttagccagttcagctaactttgcaaatccctctgcgtcattgatagccatttcagacagaaccttacggtttaagtcaacctcagctaactttaagccgtacatgaacttgctgtaggacaggccgttgatacgtgctgcagcgttgatacgtgcaatccacagctgtctgaactgtctctttctctcttttctgcctgcataggagctggtcagggcacgcattacagactgctttgcaatcctgtactgcttggaacgggcgcctctgtagcccttagccatctttaagactctattgtgtttcttctttgcatttaaaccgccttttattcttgccatcggtaattcctccttctacaattcaaacttacagatatggtaaaatcttcttcattacctttgagttggtagcatcggtaacgatatcttttctaagatttctcttcctcttagtggatttcttagttaagatgtgagacttgtaagctttattgcggactaacttaccggttcctgtctttttaaagcgctttgctgctgctctgctggtttttaactttggcattgtaaatttcctccttaaaactttctattttaacgttttgcagttaaaaacataaccatgcttcttccttcaactttggagggtttatctataactgcgatatcctttaaactctcagcgaaatcatccaggatgtatttggacttgaacatatgggccatctcacgaccgcggaaacgaagtgtcaccttcactttgtcgcccttctccaaaaactttctggcagctcccaccttggtgttcaagtcgttggtgtcaatgttgggtgacaaacgaacttcctttatctcgattaccttctgtttcttcttggcttctttttccttgcgtgccagttcataacggtacttgccatagtcgataatcttacataccggcggctttgccgtaggtgcaatcttcaccaggtcaagctctgcttcctgagccatcctcagtgcctcttttcccggcacgatgcctaactgctccccgtcctcgccaatcagccgtacttccttgtctctgatttgctcgttaatcattaattcgctaatagtcgtacacctccaaataagtcatgttgttctggaatcggcatgccccgttctttccctgtagggcaaaaaataaagcggacagcctggctatccacttcctcatataaaaccatctgctgccctatctcacacggaaactccctgaaataatacagcacatcgtttcatctatgaacccgggtcacatgttcgtgccagggtgaggcggatacctgctttcctgtcagtcgttctcacaacttatattaatctactacatttgatcgtatttgtcaactctaattttaaaacttttcttatgatttcttataatgcttttcttctaaacctttataaccctttctacagtcttcggcaaaagggcggggacgccttccggttccccgtaagacgtccccgcccatcctgtcctgattctgaatctatctggccttaaaggtactgcacctggtctccgtgcactcgcaggcaccgtcaccgcttatatcaatgcgctcagcgctgcagcggtgctcctcattgtagacacattttactgcgtcgcaggcaatctccagccttgtctcaggggtcttgaacaggttggtgaacttgcctcccctgttctcgtcaaagcttgcacagcaggtctgctctgccgtcttagccttgttgccatccaccgcaatggccgccttacagcagcagttgtcagcgttgtgcaggcagttctttacactacattccagcttggtcatagtccttacctccttctcctggtcttcattcttaccaatgacaaggatagtatgtacggattataatttttgattcataagccgcagggcttcaatgcattttccttcactgccgtccatgttataaagctctcccctggtcacaaaggtatatacctggatatcgtccacataggcgcctttgccgccgcttacgctgatggtaacatcagaaggctggcagttgctgaatttaagctctaccttccgctcctccttcacgtccacggtccttgtctgggatcccatgcgtatggtcagcctgcatttttcctctgcccctgtcctcagcttcacataggtatccttgcctgtgttgccggtcatccggccgcccaggttctggtatatatttccgcccgacggaatcattgcggattttccggtctcatcctccgcaatgtagcttcctccggaaaaacgccatccgtccataccgagtgcaaactgggcattgaacagcttattatccccataatcccggtaggtccagatgccgtaccccatggtggaatttttaagaatgggagcaacgccatccaggtacaatgatttctcatcatcccgcagctgggcattgtgctcgtatccaactgtattgtccgtaaacaggaactggtccagatacacaggcttgcctccgctgtacacatgaagccggttcagaaacacgggaatcttttccagtgcttccgctgccgtcacgcgctcatgctcattcataaagcccatgggaatgccgtacattgcgctggtataggcggcgctgccgctggggaaggtggaggaatgcataaagccctcctggcttccgtccttgtgctccaccgggtccacatccaggcgcacttccatggacagaccgggaaacaccgtctggctgtcagccagaagttcatttaaaaactggtcgtaaaacccataaaatacacttctggcctgggaatccctggccggaaaatacaggtcgtcataactggccagctcatggccgtacatttcctccaattcctccagctcataattttccatggcgtaatccacatatccgaaggctttggccatgctgcgcccctttaccccgtttcccagggacgcgctggaatccgtaaagttccagaagtcctcccatgtcaggaaccctccgcagaaattctcatgggaggatgccgcctggtacaggcggcccacatattccagccaggcagacctctctgtcccctcctgcatcagcccctggtaccggtccatcacattgccgcccccgcagtaatcccaggtatatcccaccctcagcatcacactcagtccctgggcggcagctgcatccataacacggtccagcttgtcccaggcatattggttgtatgtacagggggtcatgccgggctggaattccctccagggcaccaccaggataatattgttaaagccgtcctgggcaatgcgggccagctcctggtccatattgccactctcgctgttccagaaattgatgacccagtcatcggaataataggtggctgatttgaggtaacctgctgtccccgcagcatggtcctctgccctggcaaacccggatgtaaacaggaacgctgccgcccccagtataaccgcggccttcatacatggtcttttcattggttctttctcctttagctgtggttcttttctccgcctcgtttcagctcaggccacacagtgagcagcatggtcccgaagcaggcggcgcctccgataaagttggatatgggctctgccatcagtatgccctgggttcccattccgaatacagtgggcagtatgatgataaggggtatgacaatgataaccttgcggaaaatggaaaaaaataccgcgtttctggattttcccagtcccacaaacacggactggcccgcaaactgaagggacatcatgaaaaatccaaagaaatacatgcgtatagccggaattcccgcctccaccatgtcgccctcccggttgaagatgcggataaagaacgccggaaaccagtccacgaatccccatgccacaactgtatacaggatacagaccacggacatgaatacaatggccttctgtacccttttatactccctggctccgtagttataccctagcacgggctgggcactgttggtcaggccgtttaccggcatggaaataacctccctgaccgagttgattacggtcatgattcccacatagaggtcgccgccgaatttctggagcatggaattatacatgatctgtacaagactgtttgtgatagacatggtaaatccggacattcccaggcccacgatgcgaagcagccggccggcgtccagcttcatggccgaaggccgcagcttcagtatggtgcgcctgcctgtgaggaaggccagaatccatagggccgacagcatctgggaaagaatggtggccagggcagcgccccttacccccatgtggaaaacaaagataaaaacaggatccagtacaatattggtgaccgcccccaaaagcacggtcatcatacccacggtcccaaagccctgggaattgataaagctgttcatgcccaggcctgtcatgacaaagatattgcccatgagatagatcgtcacataagcgtctgcgtagggtatggtggcgtcgctggcgccaaagagatacagcatgggccgcttgaacatcaggcccaggaccgtcagcaggattcccactgccaccatcatcacaaaggaattgcccatgatggcctccgcctctttctcatttccccttcccctttcaatggagcacaagggagcgccgcccatgccgaaaaggttagcaaaggcaatcacaatggatatgataggcaggcagagacccagccctgtgagggaaagggtggcattctccggtatcattcctatataaatgcggtccacaatattatacagcacattgatgagctgcgccagggtcatgggaaccgccagcttcatgatatttcccaccacactgcccctggaaaaatcgtttttcttctgattgtccgattgtttgtccatttgattatccgactgtttcatactcccaccatatttccatacattctgtctgttttgacccggccgcaccaaatatacctggaaaatgctgccggcaatgtctataccgcgcccaaatcctctgttcggtcaatgtccttaagttcttcctccggcacctccatggtccacacatccccggggtgcgccttcatgattacgcttcctcccctgtcgccgcgaagtgccataagttctttcctgtaaaagctgctgaaaacagcgggattcccccgccttccctgatggcacacacagcccatgcccttccctgacagccggaaaccatgtatgaattctttcagggtgggcgtactcatatatggctggtcggccactgaaaacagaagggcctctgtttcaggagaggccgatgaagttcctaatctgagagaggcggtgattccctcaccgctgaatctgttgggaactgccagaagtccccggctctcagcctgctttaaaatcgcctcatactggctgaccaccagaacctctgtctggtgcccctctttctccagctcccctgctgcctggcagatgcagtcaagaccatggcggtaaagttcttttcctttaaagggtaccagcagcttattagagccaaaacggcttccaaatccggaagccatatagataaatgaaatcctcattccccttaaccatcctttaaaataaccgggcggagccgtccttgtcaagatgtccgcatgcaatccccgatgtctctcccatgcaatccagcatttctccggccagcgctgcttcctgcggggtgtcggcctggttgaatacaggcaggacctcggttcccggatgggctgcccgcagaggcagcagatatccatgcttcatcagtgtcatcatatcttctttttgtatgatccagtctgtcttatgctttgcgttcagctccaatgcatctgtcccgctgccccgctgctcccggctatcctcatacatcttccggccatatcgtttcatcagagccccggcctcctcaatcctcaggcagcattcctcagcccgctttccaagggatgtcaggccattgagacataaaatcatatctgtattgtccggtatcaccggctctccggccctcggcaccttcaaaggcaggcgtctggagccgtcggcctccaccagcaccaaatccgccagggaacaggcttctttatataattcccagcctgtaaatgtaattttccccttctctgccggccttccggctaccgccaggctgcggcgttccagaacggtcctgatttcttctgcattgccgtcaaatactccgaacgcaccggggcgggccatatgggtcgtggtaaccaccaggaccttaagtccccgtcccacggcctcccaggccagtctgcggatagtggatgtcttgccgcccgctcctgcaagagataccacaaaagggcccggtcctttcccggaccgtgcctgctttatccgtccattaagccccaggccatgccacaggctgtctgttccggtccatatgccgcactggtaaaaataagccctcatggcaatttctccatttttacagttaatgcaaacccttattttgatactttgactattttatcataaaacattggattgggaaagatgattttcccttccattcaaaacttacatccaaaaatcatcattcaaaaacagccggaaacaaggggaatcccctgcttccggctgctgttctattcctgctttctattcctgctgttctatctctgctggattttatcctgcccggccttgctccggccttactccggcctgcccgggccttattccatccttaccctgtccttatttctggatgttattcctgatcacaccatacaaatcaaaactcaggataccaaacactaatataactccgatgactgccataactgattccttcctttcaaaatgttttccatcactgtgatagattcattatatgtcaggcagaccggttgcgcaatccgcattatatctaatcttttggtgaacacccatttgttttttgtgcatgaatgcaaaatattttagattgcctaaaaatttttgtatttatttctttttacccatcctgtcagctctgcgggcgatcagttcccctgctatgctgatggcaatttccgccggagtctctgctcctatgtccgtaccgataggcatatggcacttttggatttcctccagggagaagccgtccgccagcagcttatccgtcaccacccgtatcttgttcctgcttcccatgattccgatataataaggatgcagagccatggcctgcttctgcacgtaataatcaaactggtgccctctggtcatgacgcacacatagtctctgggacggatatccacataatcgctgatatgttccatatcccccaccacggtcctctctgcctgcaaaaacacctggggattggcaaacgcctccctgtcatccataaccacgcaacggaatcccacatgggccagaaccggaaccagctcctgggccacatgaccgcctccgaatatatagacagtcccggcctgtaccaggggctcgatataaaacgttcgtccatccacttccttctggaaagcattgctgccgaaaagttccccctctaacagctgtcccagccccttaataccggacagccccagactggggctgtaaaggcccatctgccagcatgtctcgtcggtgatatccagtataagccagctgtcctcatcctttgagagggcgtccaggacctggccgcagaaaccggtcagcacctggtcgccgggacggatgtactggaaatataccaccacatttcctccgcacaccattccgatatccgccacctggttcctggtaagtgtgaatcctttggcaaaggaaaccttgtcctccatggccttaagggctgcctgtatagcctggtactccacggcgcccccgcccacggttccttctatggacccgtccttccttaccagcatccgggagccggttcccctgggagtagagccggaactggcaatgatagtcaccaggacagcttcctccccctgctccaataattgtcttaactctgtaaataatgttttcatgactccgtctcttcctccccggtaaaatattttttgtaaagccgttccccctccatacgcagttccttttccatccgcaggtagcggtccagaaaatccttagacttgggcgtaagctgtgaaaatcctccctccgcccctcctgactgtgtaatcagcagcgggtagcccagctgccgctccgcctcttttaaaatcttccatcctttagtataggacatatgcatctgcctgcaggctgtctgcatggagcctgtgtggtcgatcagagacaggaactgggctgcctggggtccgaaaaacccttcattgcgctccaatgtcagctgtacctggggatatacggccagcttttccctgcccaggctgcccagggcgcagtcctcgtccgattccacggccatgataatcccctcatcctccaccggaatctcttccagatgcccattgatttccggctgacgcagggcccctctgagtcctctttcaccgtgatagatcaaaagagacggaatggctgccttggacaccagaaccggatggccccgtttcccgtcatacacaggacaggcggccatggcccgggaacccatcatccgctgtatggtatcaggaaggaacatagggaatttggcaggcaggacaaataccctgtcgcataaatcctctatataatttaaccccatacagatgctgtaatacatctgagtctgctcataatcctggttgcgcaggcagatgacccgaagtccggcaatatgtttttccacctcgtccgccttctgccctgtaaccactaccaccggatcgattcccgcccgtttcagtgtgatgatgattcttcgtataaccgtgctgtcccccacgggaagcatgggctgaaaacggctgattgtgctcttgtggcctgctgcgataatgacagcccctgtcttcataagtctgttccgcctttcctggtatattaacagtctggtacgcgcccctaaagttcacctgtcaggagcaaaagggcggagggctctaccctgagccaccggggaaccactcccgccgtatcgtgggtgtggatatccttctccttcttccaccacaaaccgttctgtaaagtaatataccactcaaacggcatttcggaaatacatggagcgcatacttttataagatttgcgtcttcccgctccatataagccctggcactgctctccgacaggggttcaaaatcatgggccctgatgcccacgcctgttatggcgtcgcccacgggacggtccgtggccagctccagcccatcccagtccacggcccgtattctgcgttcccccagccgttcaatcctggatatgttcttacatcctgtaagcctggctgcccggcatgtaaccgggttctggaagatgtcccgtgtccttccggccgccagcacgcatccccggtccatgagcagcagattgtcgcagagctggtaggcctcatccctgtcatgggtcaccataatggtcacaccgtcataatccttaagggcgtccgccagctccaggcgcagcccttccctcaggtatgtgtccatggctgaaaacggctcgtctaacagcagcgcctcaggctcataggccaggctcctggccagggccactctctgctgctgtcctcccgacagctggcccgggaatcgcttttccaacccctggagccggaaccgctccaccatctcggacaccttctgctgcctggcttccccggacatgggccggcgccttctaagccccgcgtttccccgtcccccctttaatccaaccatgatgttctgctccacggtcatgcccggaaacagggcatagttctggaacagatagcccacacgccttacctggggcttctcattaatcttgagggcagagtcatagagaacacggcccccggccgcctctccctgggcatagcgcagggcaatcctgccctggtccgggcggatgatgccggctatggattttaaggtcatgcttttgccgcagcccgacggccccagtatgcccaggcatccccgtccggcctcaaagctgatgtccaggctgaaatcctttaatttctttcttatatcaacttccaaatgaagattgtattctgagttcacggctgttcccctttcatcccttccggttcacgggccttaatgctgcccagttcatcaatataatggacaggaatgcgatgaccacaataaccgccacatagcggtacgccgtatccatattgcctgcggccacctctgaatagaccgccatgggaagggtccttgttttgcctgctatgtttcccgcaatcatggcagtggccccaaattctcccagtccccttgcaaatgccaggacgcctccgctgacaacccccggcaggcctccggtcatgagcaccttccagaagatgccccactcgctcatgcccagggtcctggctgccgccaccaggttctggtccacctgttcaaatgcgcccctggcagagcggtacattaaaggaaaggacatgaccacggctgcaatcaccgtagctgtccatgaaaatgcgattttaacactgaaatattcaataaaaaactgtcctaccggccgtttgaccccaaacatatagagaaggaaaaaaccggccaccgtagggggaaggacaaggggcagcgtaagtacgccgtcccaaatcagcttccatgtttcatttttcatgctcaccacagcccacgccgcaaagattcccagaaaaaacgtaatgaaaatcgacaggctggctgtcttcatagatatcagtatcggtgaccagtccatggatggttcctccccttttccttactcgccttttgtgaatccgtattcttcaaataccttcatggcttcgtccgtcttaaggaattccacaaagttctttgcttcctccgggtgagccgtgttcttcaccaccgccacaggataaatgaccttcttggcaaggcttccctccggagcctctgccaccacttccaccttgtccgccatgctggctgcatcggtagcgtatacgatacccgcgtcagcgctggatgcggccacctggttaagcacctctgtcacgttggttccaaagcttaccttgtcctgtatcttatcccagattcccaggctggtaagggcttcctctgcatactgtcctgccggtacgctggcaggatccccgagagcaatggtctctgccttctcaatgtcctcaaacttctctatgcccgcgctgctgcctgttggaacaatgagcacaatcttgttctccagcaggctggtgatggtgtcagattcaatcatgccctcctcgtccagggctgtcatctgctttgccgcagccgacataaacacatccgcctccagtccttcctcaatctgtgtctgaagcttgcctgagctgtcataggtacccttcactgtcacgcccggatactgctcctggaacatgggaatcagttcatcctcataggcgttcttaaggctggccgccgccgcaaccagaatctctgtggattcgcctgcctgggctgcggtggtctccctggcagaagtctctgcttctgtctctgctgcagtggcagttgcctgcgttgtctctgcctcggtagctgctgctgtctcctttgcgccgcctgagcatccggtcagagctgccgctgccatcattgccgccatcatcatgcaaatctgtttcttcataattaattcctcctgtaattcttaatcttttttatatacaaatacaggtactcgttatactcagacgaccatatcgtttcccacataaatgcccatctgctgaggatgagcatttataccggacaaatacctgtattcctatatttctgttatgggtctctccggagcatgtctgaacctgctctcaggcgcgcacctggcataggtagcgggtgctatattcactgataattacgcagcgccgtgttatcttctggcacattccgaggcgcttcccctgagtatcttaaggccatggtcaaggcttcccagaatgaagccaagactctccttaaccgctttggggcttcccggcaggttcacaatcagggtcgttccccggataacagacacgcctctgctgagcatggcccggtctgtcacctccatggacttcatgcggatgaattcagcgattccaggcgcattgcgctcagccacagccatggtggcctccggcgtctgatccctgagggaaaatcccgttcctccgctggtcagcaccaggtccacctggcggctgtcggccagacgtataagctgggtctttaactggcccggctcatccggcaggagcagaagctccaccacctcatacccggctgcctccagcatctccttggccgcaggaccgctctcgtccttccgctctcctctggcgcccttgtcgctgagggtaatgacggcagctgtaaaaggccgttcctctgcaggcggctccacccgcatcacatccccggggcggataattccctcacggatgactctggcaaacacgccttccttcggcatgatgcactcgcccatgcgcttgtagatagcgcagtggctgtggcattcctttcctatctgggtcatctccagctgcacatcccccgcgtatagtctggtacccacgggaaggcttctgaaatcaatgccctccaccaccaggttctcgccaaaggccccgtctatgacattggctccgcgctcgttgaacgccatcaccttatcataggagagaaggcttacctgacggtgccagtggcctgcgtgggcatctccctcaataccgaaatccaccaggaaatgcccctcttctatggccctcttctcaattccccgtttatcactgatacagatagccttcaccactccggtgggacagacaccctgttttatctgctctgacatataccttatcctccaatagcaatcatgttgtgtgcttctgttatctgacccggacgctcgaagcagtgggccgcgggtttgcataatacagcctgttccatggccttcctcagttccctctgaagcccctcgtcagacgggcagcccgcatagggccagcggtaatgcccctcctcctcaggccgttcctgtccttttctcagtatccgcctcagatccactccgtcctcatagcacagacagggtttcagatacccctgggacgtaaggcgcacccggttgcagtcgctgcagaattttccgtggatcgcgctgatcagtccgatactgcccttaaatcccggtatccggtagtagacagccggtccgaagccatggacccggtcatcctcctccatatcggggtatgcccgcatcatctcctccagcagctcctggtggttgatggtcttaaaattctttccgtagccaatgggcatcatctcaataaaccgcacatccaccgggtattcccttgccagctccaccatctgccgccagccatcctgtccggcttcccgctgttcctcgtccatctggctgaaatcaatggacaccgcattgatttttacggatacaggcatggcgcaggcccgcctgacggcttccatcacagtgcccagggcgtcggttcccgttatcctctggtacaggtccctgtccagggtgtcaaggcttatattgatgccgtctatcccggcctccgccaaatcatccagataccgctccagcagcacgccgttggtggttatggttaccttctcaatgcccggcgtgctcttaagctgcttcaccagctggcagcagtccctgcgcaccagtggttcgccccccgtcaccttgatatggcgtatgcccaggccggcagcacagattcccacggcctggatctcctccagagacaggatatcccatctgggcacgcactccaccccatagggcatgcagtacttacagcgcaggttgcacctgtccgtaatggatatcctcatatagtcaatggttcttcccaatgcatccttcatattgctcatcccctgttccgggcacatctggggttatggaattccccgctcttgcctccgcttttatgttccaggtaaatgtctccgatctccatggacttatccacggccttgcacatgtcgtaaactgtcagcagcgccacggacaccccggtcagcgcctccatctccaccccggtttttcccgtggtcctggccgtgcagaccgcctcaatctcattgctctctttttttatggtgaaatccacggtgagcttcgtaagattcagtatatggcacagaggaatcaggtccgaggtccttttggcccccataatgcctgccactctggcaacccccagcacatctccctttgccatggttccccgggccaccttctccaggcactcagggctcataaaaatactacctctggccactgcctcccgctttgtctcagccttatcccctacatctaccatcagggcattgccctggtcgtcaaaatgtgtaaattccatgtctgtttcctttccaacggtttccttttcaacggtttgttacatccctttgccgaacccgcagttggggaaggtacattccggacagttaaggcaaagcccgccctggcccaatgcggccagatcatctgccgtcacctggtcatccgccatgattctgggcagaaccaggtcaaatatagtacgcctggcatacatgacgcagcccggaagtcccatgatggcaaccgtacggggattttccccatctttaacctggtaataggccagcaggaacatggctcccggcagcaccggcgcgccgtaggatacgatgtctgccccggtgttgcggatggcaagcggcgtcttgtcgtccgggtccacactcatgcctcccgtacagacaaccacgtccgcgcccttttgtatcatatccaggatgctggccgtcaccttggtatcatcatcgttccatgtcacatggtcaataacctctgtgtcaaactctgaaagctttccccggatcacaggggtgaaggtatccttgatacggccgtaaaacacctcgtttcccgttgtaacgatacccacctttttatgtaaaaatggtttcagctccaggatgggacatccccctgtggcctctgcggccgccttttttgctgcctccatcttttcttcctcaatcacaagagggataatcctggtccctgccagcttgtcccccttcttcactgcaaaattgccgtgacgggtggctatcatcatctgtccgaatccgtttaccgccttaagcccccggttatccacctttaaaaggccgtcacatgctgccgtcagctcaatctttccttcctttgcctgggaacgctccatatgctgccctttgcacatgtcgcagagaatctctgccgcatcattctcatgaagcattccatcttccttctcccacacataaagctggtcctttcccacacttaagaggaccgggatgtcttccttcgtgaccacatggcccttgcggaataccgcatcctttgtcactcccttaataatctgggtgatatcatggcacagtacggtgccttccgcatccactgtctgaatcagtttcattctatttaacctccgcccgttatttatattttcaaataacgcattacatatagaatagcaccagcgttcgattttgtaaagatacatacactacaaatggaaattaatatatgtttttatcagtttataagagaaaatggccgggtgttccatctgcgcggcacacctgaccatttccacacccctatgaggtcattcctattgagatacggaaatgtatcattttaggaccttgtttctgtatctggctgtaatcattccagtatctgagattcatgtaatcctgaggtgtatccgcgtccaggtatattcccggatcctccacctccggttctgtaatcggcactcccaggtgctccatggcccccttaagccctcctgcgcccttataggcgcagatatccggtaccagccgggaatccatccggacaggatggcccggacggccgccgcagaccgggcgcaccagagcgcccggacattccatcacctgcttaaaggtgtcctgctctatcagcgggacgtccgcaggcgtaatgagaatccggctgcacaggccggcggccctggatatccccagtttcaccgagtcaaacatctggctggaggcataattttcattgcggacaaacatgatatccagaggccacagataatccatcagctggtccgctttatatcccgccacgatgatgaccggagatgcccctgctgtcttaagattttcaatggcccttacaataatggtgctgtctcccagctccagaaggggtttgaattcatgcatcctggaggacaaacctgccgccagtatcactgctccggtcctttccataatatacctcctgaagatacctcctgcttttgtcacggcggtgtttcccgggactttggctaaacctcctgtcccggcgccttcactatgaccatgacgccctttgcccgggcagccacagcgccttcccgcttaatggtgccctgggcccggatggaacgtcccgttccaaactccgtcacctgcgcctcacactcaatccgttcccccacatgaaccggagccttgtaatccagttccagatgggctgtcaccacatccaggtccgtatagtagagggcgtgtgccataaggtcatccataatggaagccatgatgcccccatggagcatgccttcatatcccacatacggcttttccacggtccacaaagccctggcccagccttctccctctgtaatgtccaggtgcagccctatggggttcaggcttccgcagacaaagcagttatctgattccatccttctcatacacgtttcctcatttccctaaaaatggtctcccaggcgtccccaggtctctgagaacaggccggcgtccatgagggccggtcccccctcaggtatgattggcttaaagcccatgtggtccaatatctgtgtctgtatatcaatgcccggagccacctcggccagcaccatgccctgggctgtcctcttaatcacgcaccgctccgtgatgaatgtaacccggtttccctttgccaggcactgctgcgcgttaaaggaaagctgtgcgcaggattccacgaacttgtcaaaacgtccctcctggtcaatgcacatcttaccgtcttcaatgtggcatttcagccctcctgccgtaaatgagcccacaaaaatggagtgtctggcgttggccgatatattggggaagccgcccaccccggctatcctgccgttgaggaatgtggtatttacattgccgtccctgtccacctcgctgagtccgaatacagccacatccagtcctccctggtcaaagaagctgaagtggtctgtctggggatacatggccaccgggttataatgggcgccaaagtctcctcctggcgcaggaattcccccgatgaggccggactctgatataagggtcacctgtgagtcaaccccttcctccatgagcacattgggaaccagtccgggcatcccgatgcccagattgcacttgtctcccccatgtatttccatggcagtgcgccttgtgaatactttcttatcatctaacggaaggggcgctgcgctgttcttcatggggatgcggatttctccggtaaaggcaggattaaagtgggtgatatgggtctgcatcatgcgatccggatgctctgcaacacatatacaatccaccagaattcccggcaccttcacattcctggggtccagggtccctgtggcggccacccgctccacctgggcaatgacaacagcacccgctgcctttgcagccatggccaggtccagcggctcgcagggcatgcattccttctcgtatgtcagatttccatcctcatccgcggtggtggcccgcaaaagggccactgtcagcttgggcagtgtataaaacagatactcttctccaaggaagtcgggaatgtaggtgacaatctgtttcccttccttttttgtcttttcattgatcatggccccgtcgtatctcgggtccataaacgtgcccagtcccacctttgtcagaagcccgggaaaaccccgtcccatctcccgccaaatctgccccaccactcccaggggaatgttgtatgccagaatcttgttgtccacgatttgttttgtcaccttaaaggaacatcccacatggccgtgtatgctgcatgaaagcagtccgtcgtgagccagggcacactcccccctgcaggtttttccgtcctcagacatccggccgaaatccccctggcctgcgccgtggatatgggtaatgcccgatgggtgtcctgtttccataaatctgttctcaattgcaagcccgatttcctcaggccagcctgtcattccctgaactgccgaaccgatgaccgctccgtcctgcaccagctctgccgcctctttcactgttatgatttttgccatgtatccataccgtcctttcctgtctctccggccctctgaccagagacagctgtctccctatctgaccgccgcagtcctcctgattccgtttccgcctgccgcagttcttccgtttccgtctgccgcagtcctccctctcccgtttccggctccgtctgccgcggcacccttccttccagatgctccctggcaaggcttcgcagctggcctttggatatcttcccggtagctgatatggggaaatggtctgtcagctctatctcctggggaatcttgatggtggcgatttttccccggcaccagttcctcaggccctcctttgtaaccaccgcaccttcctttggacggatgaaggcatataccagctcgccgtactgttcatctggcgcgcccaccacggccacatcctccaccggctcataattgcgtataaaatcttctatttccctggggcttatattctctccgccccgtatgattaaatccttgcatcttcccttcagggtcagaagcccgtcctctgacagagaggcaatatccccggtgtgaagccagccctcccggtccactgccttttccgtctcctccggattgttgtaataccccttcatcactccgtagcttttgatgcacagttcaccggcctggcccggccccagcacccggcctgtggttaaatcctgtatccggcccgtaacccccggccacagccttcctacggtggagaccgctgtttccagactgtcgtccatggaggtgctgctgattcccggtcccgcctctgtcattccgtacatgacaactgccgcctctgcccccataacccgtttcatgtcccttagggtatgttccggacagggcgccccggcggtaacgcacaggcgcaggcataaatcctccccgccggcctttccttccctcatctcccggataaggcggatatagacagtaggtacgctgcacagcaccgtgcaccgctccttcctcagcatttccaaaaggcagattctgtccgttttctcgtaacagaccagggctgcgccggccatcatggaactcagcacggatcccacacagccaaaggagtggaacatgggcggcgtcatacacagccggtcctccttctccagccccaggtactgtacatgaatccaagcattttccagaatctggcagtgattcagcatcacgccctttggcacgccgctggtaccggaggtatggataatggtggcatcgtcaaaaggacggaccgccttcatcctctccttcagcagactgtcatccattgacattcccagttccatcagcttctcaaactgccaggcgcagctcctgggccgttcctggtccgtgacaatcacatggcgcagcaaaggcagacggggcgcataaatccttccgggaacagcctccttaagttccgggctgatctggtaaaacatgtccatgtgctccctgttcttgattccctgcttaaggatgaccgccttcacatccgccctgtggagcaggcactccagcatatccttcttttcgtggatgttcaggttcactatcactgccccggtcttctcgatagctattttagtcaccacattttcccagcaattatccatgataaccgccacatggtccccttttaagatacctatgtgcatcagcccttttgccagaccgtcgctgcgcctcttaacctccctgtatgtaaggcgcacacctgccaggctgtcaacgacagcctccctgtcgggaaagcgccgtgcctgtatgtccgccagctcacccagggtcagatggatgtaccggttgagccagacatggtaaggcctgccctcccacatggcctccacgtactcccggccggataccaggggtttgttcctgcatatccctgaaagcatatccgcgaaggcctctgaacagggcacagcgcccctgaaatccagcaggcagccgttcctgtcaaagagaaaggaggcttccccgggaccgttctcatccctgcaaaccactgcttctattcttctctttccgtcaatcaggtcttccatccaaccttcccctatctctgagcctgttttttcatagctgtcagaacaaacaatataatcaatgccaccacgcccatggcacccactgccatcagcggcacgctgtatgaccctgtgttgtcgtagagactgttggccagaatcggccctatgtaaccgccaagggcaaatccgataaacataatgccgtaattaaccccgttatatttgattccaaaggcatctgccgtcagagccggataaacacccatgcttccgccgtaacacatggcgatcagcatggcaaataccaggaacagggccagtgatccgctttccgtaaacgcggacagggcaaagccgcttaccgctacaatcaccgccataatgcccagtgccggataccgccccactttatcggaaacccatccccagagcaccctgcctcccgtattggccagaccaatgatactgaccgcggttgccgccactgccgcgtccaccccgcctatggcctgggccatgggagatccctggctcaccaccataaggccgcctgtggcaaatatggtaaatgcaatgatcatcagataaaatcttgtgtcggccagcatcagcttccagttctttccttctgcagaagcacccgaactgttcttcactgccggaggcgtccaaccagtgggcagccatccctcaggaggttcggttatgaaacaggcagctatgattatcataacaccaaacaaaattcccagcacccggaaggtaaacatgacgccgccggaaccaatcagggactgcataataggcggaaaaatgatgctgcctgccccgtaggcagccgtggatatgcctgcaatcaatccccgcttgtccgggaaaaaccgtaccgtattgccgatggtaatgccataggcaaaggcaattccaaaaccgcagagaagtccgtatgtcacatagagcatggtcaggctgtggataaagctggtgcatatgagtcccgcgctgaacaggattcctcccagccacaccacatttctgggccccttaagcttcttttgaagtccgttgcccgcaatcatgggaatgggcgccacaccgctgcagattgtaaatgccagggccagctgcgacttctgcacctctgtgccgaatatcactgccccttcgttgaaaagtcctgtctggtaaacactccatgcaaaccccgtaccgatacatatattaacaataacactggcaaccagtaccgcccacctttttttcatcagatccataaataaccttcttccttgttcgcctaaagacctgccgttaattgttatttttttaacattaatttgaaaaatatagttacggttccacctcctccggagcacatctgacacccgctccgggaaggtgaaaccataaactcccagtcatccatgtacttttatgcctggaccgcccccatatccagaatcatcttctttataagagcccttacctcctgtatcttatatgaattattggccatggccgcggtcccctccactgccagttcagcagcggcctctgccagcgcctcatccggcttcctgccggctaaaaacgcctccacctttttccgctccatgggcaccggggccacgccgcccaaaacgatccgcgcatcctctatgaggccgtccttcatcctgtatgcgtaagccaggctgacaatggcaaaatccactgcctcacggaccctgaatttatcataggccgtggtatatccttccggtaccctgaaccggacagccgtcaccagctcgcctgtatccagcatgtcagctgctttcaggcgggtggtaaagaagtccgccgcccttacggttttctttgtggtcacaatccgggcatctaacaggatgagcaccggtgaaatgtccgaggcgttgacggagtagcagccgcagttcatacaccgtccggcctccctggccgcttcctccccggtcagggtgaagctgtcctccttatccagggcccgctctgcggcagacagctctttgtcctttaccgcgtgctcctccttgacgcctgcggtgtcaaaatggataaatttatcttccctgcgccgctcaggcatgactgcatagcccctgttaatggcctccgccgcgttgcgcccggagcgcacgccctggatcacggtggccggtcctgtggtggcgtcgcctccggcataaatcccggacttgctggtggcctgtgtgtacttgtccacctgaatcagtccccgttccagggcaaggccgtatttgtcgcccaggaaacttaaatccaccttctgccccgctgccatcagaatggagtccgccgataccctgagagtctcctcccggtcgtaccggggattgaaacgcccgttctcatccttgacggaggtacagcgcataagctccattcccgtgacctggctgccctcatagattgcctttgatacgccgtaggacggcatgatttcaatgccctcctccctggcccttgcaatctcttccctgctggccggcatctcaggctcggactccaggcaggccagggtgacgctctctgcgcccagacgcctggcggttatggccacgtccattgccacatttccgcctcccaccaccagtacatggcggcggtcctttttgttcatccactggttgacttccatcaggaactggaggccgaactccgtgaactcctcgccgtcaaatcccagcacaggacgtttccaggcgccggtggcatagaacacattgtcatactccttctccagatcctctgcctgtatatcctctcccagacagcagcccaggcggaaacggattcccattttttcataggcggcagccacctgcttcacataggacttgggcagcctgtagttgggaatggcataggtcagcatgccgcccggctcctccatcttgtcaaagaccgtcacatcatggcccgccttcctcagataataggcagcgcttaggccggccggaccggctcccactaaagccaccttatggcctgtctctgtttccggcgccctgtaaaatgtgtccgggtgctccagtatgtaatcccccacataccgctccacgccgtggatggacacgctctcatcggaaccgcagcggttgcactgctcctggcatgtatgtgcgcagaccctggatgtaatcatgggaatggggttggcttccatcagtatatgggccgctccctccacatccccttgccgaagccgctccatataggccggtatgtccgtattggccggacactggacagaacacggtgtggtgtggaccttcatgcccccgaatatggaatggtaacggttgtctcccataacggcatagcactcttttccgccctttctcatacagtccatcctgccgccgatgccgtggggatagcggtaaaaccagcagcgcacatcctggcatatgttgcctcccatggtggccacattgcggattaacggtgttgccacggagcgggccgcctgagagaggaccggagccttttcattgagcaggtccgactttacgatgtcgcagagttttgtcagggcgcctatttctatggtgtccccgtcctgctttatgtattccccgccccggacggtcttaaggtcaaccactttttccggataatcctccagaatctgttcctttaacactccaatcaggtcggagccccctgccattacgactgttttcccttttggggactcttttaataaggagactgcctcatcaaaggtggcagcgctctcatgctcgaaatatttcacagtgaatcctcccctcttatgctttgcctaacgccttaagtataactgccggagttgccgggtaatccttgatgtccacgccgattgcgttggaaatggccatcagcaccgcgctggctcctgccgcaccggaaatctcgccaattcccaaggccttaaacatgaaggaatctatctgggattccatgatataggcgtcatatggcgggaattcattgaacgttctccacttataatctatcaggctggaggttaaaagccttcctgtggacggatccaggatacactcctcaaatatggctgtatcaatacaggctgatccaaatcctccgtgcagctgcatctccactgccttggaatcaataatctgtccgatgtccgtgcctccggccaccttcaccagcttggtattgccggtttccaggtccacctccgcctccacgaatatggccatacagctggggatattgaacatctccatgtgctttccatatcccacaatgctcagttccttgggggccagcttgaacatgggcactaccagctgcgggttatcccgcacatagaccataaagtcctttgtgtccagctgatcaacggagcgcttaaagtaaagggcgcccagctccagagcttttttctttgcctccatggctgccagggatactgccttgcctgtggtaatggtgcctctggaaccgcagagaccgtagttggacgggttgaacttggagcccggctccgtgatggataccttttccaccggcacattgaggacctcggccacaatcttgcacgcgttgcttctggtacccatgccggattccgtgatgtcacactcaatgatggccgtggacgccctgcggctgcccaccaagtccggaacaatccttacaatggcctctgtgttgtcctcgctgatatcagcatttccgatgacgcccatgcccacgccccttgccttggttccctttacacatgtgggcacgttccagcccttccatttaccggcccatccaaagcggtccgccgcgttctgcatggcttccgggaagaacagggaggagcggctctgccaccaccgcccgtcgcgccagataaaccggtcgccgggagcaatataatttttcttaaacacgtccagaggatcaaaattgcccttcttcatcacggcgcacatcaggcgctccagacagctgttaagctcctgcccgccgtagccgcggacaatgcctgccgcctgtttgttggtcactgcgatgtggctgtccatataccagttgggacatttggcgcataccagctgtgcctctcccagtcccacgcccacctggccctgtatggagtccgcaatggctcccgtgtccaccagccagtcgccttccacagcctttacatagccttccttgtccattcccacctttgcggtgatggtactgcccagacgtacctcgtaggccataagctgctctgcctttgtgagcacaatctttaccggctgcttggtgacaagggacagcatggcggcggagagcaccgttgtcataagggactgcttgttgccgtagcttcctcccacgttaaaggtctttacgctcaggttggaattgggaatccttccctcgcccatgagcttaagaatatgggagctctgggacgatgcccatatggtatactcattgccgccctcatatttggcgatgcaggacggggtttccggggccagaggagagggcatcttgtcaaaggccaccttgtcctccgccacataggctgcttcctcaaatcccttctccacatccccgcggataatctgccaccagggaccgtccggctggaaatacttgattccgttgtcaacgtgattgcccttaaacctggaatatatctccactgccccttccttcagggcgtcctcagccgtatacacggcttccagctgttcatattccacatcaatcaggtctatggcctcctctgcagtctccactgtatcggctgcaatcagagccaccagatcccctacatagtaaaccttgtcttccatcaaaagcctgtgtacaggaaggcccagtccccactgttccggcatgttcttgtgggtgatgacagcccgtacgcccggcagggcttctgccctggatgtgtctatggaaaggattctggcatgaggataagggcttcttttggtctttccgtacagcatgtggggcactgaaaaatcgtccaggaaaattgcctttcctgttacaatgtcctttgcgtcttttctgggtgtgtacttgcccacatgacggtaattgggctgtttgatatcgcggtattcaagcttgctcattcttcaaaccctccttctaatccaatgaatggtcgctgtttgtaccatttgcatagggacttaagaacagttcctggcgtaccgggatgggattttccacatcatcattggcccggtgcatcacagccagatggtcctcctcattccccgccaccctgttaatggcccgcagcaccgtataatggctgatgcagcggcagtaattgcccgacatggcttccttaatctcatctcccgtgggatggggattttccagcagaagcgccttggccgccatgatgattcccggggtacagtaaccgcactgaaatgcatactcgtcaataaaagcctgctgaaggggatctaaccccttctcagggtcctccagcccttctatggtaacaatgtcctttccatcgcaatccacggtcagcagcatacaggacgtgaccccttttccgtccatgagcacggtgcagcacccgcaggctccttcactgcatgactccttggagcctgtgagctggagcctctttcgcagggtctgggatagtgtctctgaggggggaacctgtccgaatccgtccccgattgagaaacgatattccctcccgtttaccgtcagagtaacatattgtttcttcataacgtttccttgcctccttatctggattaagttaatgggatatatttgttaagattatgctaatctaggtcggtcgtttgatttatttttatcacaatgtgatacatttgtcaatgatatataaatatcaatttatttattcgtatatttttacagattcaaacgacaaataaccctttggatttgtgcaacttgcactccaaagggttattctcatttgtatatatcgtctaaatacgattattgggccggatgaggcggaaacagctcaggcttcatcagccgctggacaatagccagacaatttccctttatctcctcccgtatccagaggggcacagactccccctccagcggttttggaatcagatcctctatgaatccccgatgttccccaaaggatatgatggatccgttgatatgtctgctggctataatggcctgggactgggaaacaggggccacggtctgaatcagctcagccatcacccgttcctgccggtcaaaggcagcggctgacaaaggcctcatatccccggggccattgttctcccagtatatcagggcaagggtggtcttatactgtggggcaaaggccacctcaatctgaagatctatgagcttttcaaggaattcatatgccttctgcggagtcattgcatcctgtttaaaggtcccctcaatctccatatacgaggccgcataatatccctttaccttttccagcatatattccaggcaggctacgtacagcctctccttgttggaataatgaaaggcaatggctgacaggttcacctctgcctccgaagcaatcattctggtggatgtggctgcatatccgtactgcgagaaaagcttaatgccggcttttatcagctttgtcttagttgaattatttccttccatgtgacttcatctccttatgctcagccggcagcccattcccgtatccgcgccttcctgtccacagatgcctggggactggtgccgaaggcatctgccgcctccaggcttcccatggccgattccagacaatgcctgactgcctgagcctgattatattgaagtctatggttctccctggcctggggggtggtgcacttgggcgcgctctgacggaaacgctcatcaatatccaccattctgtcctcaagcgtcatcttatccgccagaaacaaaagggttctctccgtcagccctgactcttccccgccttccagccggtgatggcactgaatgattcctgccatcaccgggtatccctccatccgcaggattctggctcctgcccttgcgtggtccggcttcagacgcgcgatatcgtgaagcagcccggctgtcctcaaaagctcaggatctatgtcataccccagacgtttaagccttacagcccactggtgtgccagtcttgccactgctgcctcatgaagccgtatatgctcagggacgctatagcggtccgacagcctgcggcagatgccgtggtcaggatagagaaggggctttacaccggtctgctcatagaatcctctgaacccgccgtcatcgtctgccagaatccggctgattcctccatatggctggggaacttccagtacgcggttgatatcccacccgagaataccgcacatcagcccccggctcacaccgcagtgggtcaccaccgccacatccccccgggtattcccaagaatgcggttcagggcatcctgaagccgctctgcgccccgggcaaaggattcccctcccggaggcgggaccgtgccgatggaacgtcccctctcttcatagagctgcgggtaccggctgcggatttcagtgaattccatgttctcccattcacctgcatccagctccaccaggccctcttccacatgcaccctctgccgctctcctgcaatatactccgcggtttccatacacctggacagaggactggaataaacagcttccacacagcggctcttaaaccaggaagccagttccatgctctccttcctccctctgatactcagtgcgagattcgtatgtccaagacatctgctcacatgcccggtccgttccggttccccgtgccttataaggtatatcgtcctcatatgccacctcatttcgatgcatcgccgatactaactaggtcgtccgacctagttctgtgtttccagtgtagcacagatgcatttaaattacaatataaggcagccagaaaggccatattcttcaattatcgttatttaatctcataaacaacgttgacttgagtatatcacatatggcggatggctgtaaatataaagcgcctcaatgcatcttacattttctttgacttgattcctgcctgcagacccacctgagcagttccctgtactcttccctggtgtccacatccaggtaaatactctcatttccggcctccaggtcctctaccggcacgcctgaggcttcaatggcccccttaagtccctggtccccggcataggtgcagatgcgtctggcaatctccccttccatgcatatgggatgccccggttcgccgtcatggaccgtccgcacaatctgcccgggagcttccatcacctgcttaatgatatcatccgttatggcgggaaggtccatgggcatgaccaggatccgctcacacccttccagtgccgcctgtatacccagctttacggaatcaaacatctgtgtatggcggtatctggtgtttctgacaaaacaggcgcctgtgccctttaaatgagcctccagttcatccgccctgtaaccggtaaccacgatcacggggtctgcccccagccgcctgagcatggacgtgacgtgaaatgctatggtagtgtccccaaacggcagcagaggtttgaaatcccccatgcgcgaggacagtcctgccgctgccaggacagctcctgttttcttcatgcttcccgcccctttcctgtaaaagaccgtcttaaaaggctgccttacaggtattatatccggccggagtgcgggattccagtagtgcaggatacaccctgtacatgtgcaacaaagaaaaacacggaagcagattttactccggttccgtgtttttctttcattattcctactggcacatcctctcctggtgccgtttcagtttctccaggctgcggatgcagtagtatccgttaatctgttctatcagcgccatctcctttaaatccttgatggccctgaccgccgttacccggttaattcccagcagatttgacaggagctgctggcttatcttttctttgataagtattttcccgtcatagggaaccccgtagtgctctgcaaatataagcagcagatcgcaaatcttccagccggcgttgtggaaattggtatggcgcacctgctccatggctgacaggaatttggtggagagggactccataatatccatggagagctgcgggtcatgggcaatgccctttaacagcatctccttggtgatacacactaattcagacggctgcacggtcttgaaattcacagctgattcctggtcaaagagaaggtttccttccaacaaaacagaattgctctcattgaaattataaatacgctcctcgcccgtaaccgttgtctcaaacgcagccacacgcccggtcttgactatgtagcagtagttgggctttgtacctgcctgcaccagcatatggttctttggaaatacctttctctgtcccagcttttccagacgcgatattcccctgggcagatatagaagacgtgatacaaaattagcatgcggcatctgtactgcggtattacactcctgacctaccatataaccaccctctcttttatggattttcaccatatgaatccccaaaaacgcctgtttccttcaacaaaattataacactgttagtattttaacaactagtagcctatgctacattatatcaaattttcacatgtgatgtaagtgtcatatatattgcagcagtaactttccacagataatcatttcgtgatacaatgaatcacgtaattaaatcataggaggattggaattatatggaaactgtcatcatactgggagctggccagtttggccgcggagctgccagactgctgaatcaggaaaacatggcccttctggcgtttggggataataaccctgccctgcaccagctgaccgaatcagagcggacagagaaaggatttccagccaatgtcccggttttgccggtagatgaagccctttcactgaaacctgattatatcattaccggagtgacggacccgctgcgttccggccagcttaaggatcaggccctggaattgggatacgaaggcagatttctgatgctgagccagctttaccggtattttgacatacgaaacgccaccctgaaacggctggctgagcggattcatggacagggcctgcaggaaagcatagcagaactgggcgtttttaagggcgacacggcctggaagctcaacgccctgtttccgcagcaaaggctttatttattcgatacattccagggatttgacccacgggatataaaagaagaaaaaagtaagggatgttcctttgccagggaaggtgaattctctgacaccagcgaacaggccgtgctggggcggctcccctttccgggacaggccgtcatacgcaggggatattttccggatacagcggcaggactggaacaggagcgcttttgtctggtaagcctggatgccgacctgtacgcccccattctgtccggtcttatatttttctacccccgccttgtacccggaggcatgattctgctccacgattacaacaatgagcggttccgcggagccagacaggctgtggaggaatttgaaaaacaatacggccgcctgtgtctcgttcccttatgcgaccttcatggaagcgcggtgattgtaaagccttgtgattagcaggcaacaattgtaatctgacatcacatgtgacctgggctacttgtgtctgttaaatttatgacctacaatatctgcagacagtatgatagggtgataagggggagaatccatgaagacagttgttattctgagcaccgacaatcttggtatgactgtggcagatatgctgaatccgcgtgaaatgaaactggtcggtatgggagataccagacaggaaacctggaatgtattttcagacctggaaaaaggggaactgaaggaagaaatagagggaatgccaatcatgccggcagatctggcagtggcccttcagccggatgtcctggtcatcgcggccacggattccgaaaaaagccatgccctggaatacatggccatccgcgcaggattcctgaacgacattgttttcatccgggacctgcatgagcagttctccatccgatgcagcgtgctgcggcgtctgtgccggcggctcaccgggctgggggtggagggaaatgtggcagagctgggctgttaccggggcgacacctcctggcagctcaacgtgctgatgccggaccggaaactgtatctctttgacacctttgaggggttcgatgaacgggatgttgacatggaacgaaagctgggatgctccgacgctcagacgggcctgtattccgggacagacaaggaaaagctgatggagcggatgcccctgcccggacaggttgttatccggaagggatggtttcccgaaaccgcctttgacattgaagatgaaacattttgtctggtctgcatggacgtctgcctgtaccagcccaccctggccggcctggaatttttctttccccgcatgggaagaggaggcgtcatcctcttaagcggatgcagcggcacccggtacaggggcgttgcaaaagcagtggaggacctggaaaccagatacggcgcccttcttatgcttccggtgggagacttagacggcacagtgatgattgtacatccgtaggatgggaaatcatagaataaaaatcaacttatggattccggacatatggaatccggaaacggcagcagccgcaggcaaaaaagcccaatcctttacgttcttcctatggcgtgctttaaaattgctttacatagcacgttccggctttcacctggcggttttgaggatggaaaagagcgcataactgcccgccgccaaaaaacgcatgcatctgtattggggaatacgcaggcagcgtacagacaaggaggggtggaaaaggtaattttttcggggctgtaaccaagcagccggtacagcgctgtcggcctgtgcagccgcacgccggttgtccaaccctggttgtaaagaaattgaatggcgaatctcccaggatacgccatgctttgtattaaagaccagaaagggcgtattttatgaacttttacaaaaatcattttggtatgattatatcttctgttgtggctatctgtatctccctgattatggccacatcggcaatctttgttgacaaactcacgttcacgctacccctgctcatcaagaactggggcacggctttcctggtgatatcattgaccggaatggcctttccgctgacggactggtcctttgccctttgcaggaaaatgggactcaggcccgaaaccctgccccatgtacttgtggaaaactttgtggccaccctgttttttaacaccacggccaccattgtcctcacagcagtcaatgtctttcacaacccggaaattgaggctgccgtggcagccggttttctgccaaatactctgaccgcatttgtgcagggtgtgcttcacgactggcccatcatgtttatcatcagctatgtattcgcatttttcgtgacaaaggcagccatcaggattgcaaagcaggctgtgggtgaacttaaatcccctcattcaccccagaatcagtttcaataaggaataacagccaaaaaggacatcccgcatcgtgactggtccatgcgcggatgccctttttcctttcatttttcctctgcgttccttctaccgttccctctgccactccccttttgcattcctgccaaaggcactgccctcctttgcctctgcatagccaaggatggtggcatccaggttgcatatatcatttagggaccagatggtaaagttgtccggattcctgctgtattcatcgctctcatccccggcaaaaaacctccatcccgtatccgcccactgttcgctgggccggctgtccctgtacatatatccgatggcccgtccctcctcaatctgctttgaaacaatgcagcctccattatggggcagaagactgacccattcccgcttttccggcgcgtaccaggcattcctgtaccaggctccgccctcctccagcaagtgtaaggccagctttttattcaggtccaggaaggaaagcatgtcttcctcatcaccgcccggcacatcgtagacagccccgcagatacagctgaccgcatagtccttaaaggtgtggtaaaatacctgggccttgcggacctgatagtcggtcagctcatcaaatgtctccctgtctatgatgccgcaggcacaggccaggcgtcccagtccgattctctcattgatgtcccatgcatagaacccccgctcccccacatagggacggaacagggaggcccgcttaaaccgggtctcaaacgcccgtctgcccttctcctccagctcctccaggtcaaacagcggcgcatcgcaccagaaggtcataaactgctcatactccctgcccgaggtaaactgctccatacagaccttttcaaggctttccctgtcatagataccatagagccggaacagatgggccttcagctcctctgacgccggttcatccccacaccggtaaagggtccggtaccccatgtggcacggtatccccggcgccctgcggcatgcggcaatcccgctgagcagcagggtaaatgcatgcctgtccgtctctgccgggtccggcgcttccggcattctctgtatctcctcaaccagctcctttacagcctgtgatactctgtccattcttttccctcctggtccttactgcatgtttaaaactatctgctaccagcatattacaactgtaatttaaatgcaaccttgattcacattcattttgatcctgcggccaaacaaatacgggcctcctgttcccggaagcccgcatcatccaaatcttatctctattcccattcaatcagacaccctgccccatggcagccctgccttcatacctgcactccccggataagccctggtaatggcaggtgctgcaatccgtgacataccccacatacttctcagtctcaatataagccccgcacatgccctgatggcgggcgtatacctgaaggcacatatcagccacgaaattacaggcagtggctttgcccccgcaatatttgcagacataatcgccgcaggccctttcctccgctaccacgccgttcggcaggcgcattttctttaattgacggcccataatggcagcctcctttccatctttgaaagaaggcggcatgaagccgccttcctggtttcatctgatcatccgctgaactgcctttattttgaattcctgtcatccttcatgccgtgcagcgctctccagatatgctccgggtccagaggcagctctgtgaagtacacgccggttgccatgttgaccgcattggcaatggcaggcgccacaggtgctgcggagccctcgccagcttcctttgcacccagaggtccttcctcgtccggtgtaaagtcgtaaaaggtgcgcatcttcggcatatcaagggcagtgggcagccggtaatcgcggaagttgggattgagaatctttccttccctggttacattgtgctcatagacagcatagccaaggcccatgccgatggatccctccagctggccttccacggccctcttattcagtgcgcggccgcagtcatgggcaaatacaaattcatcaatatccaggacgccggtctcctcgtccacagtcagatgggctgctccggtggagaagctgtatgcaggcgcgtagttggtggtattgttgccgttatactgtgaattgtcggtacggtggtaataggatcccacgccaatcagttcatcgccgcccttgaccgtcatatacttgaacatggcgtctccaatggacatctgatattctgccttctccttgctgattacctttccgtccagacactctaatgtctccggcatcacaccccacataggtgcaatgacctcaaacagctggcgttttgcatccacggcagcgcggcgggccgcattgccggccaggaaggtaacacggctgccgtaagagccggaatcccagggcgtcaggaaggtgtcggacataaaggtcttgaccatatccatgggaagccccagttcctcggccacaatggccgtcataaccgtatcggaaccctggcctatgtcgtgggagccgatgtacagggtggccatgccccgcttgttcatgcgcagggtcacgcacgcagagctctggttgggcgcttccagcaccgcgaatccggtgcccgatacaaagccggtgcccgcaaaaccaatgccctctccctttttcagcttatccttcttctcataccagccaatttcctttgcagccgtatccagtgtctccttgtatgcgcagctggtgattgccagtccggccggagccacgtatccggggtctgccgcgcttatcttgcggaactcaaccgggtcaatgcccatctggtcagccgcgaactgcatgttcaggtcatgggcaaaatgcacctggcatgccgtatatcctctcatggctcctgcagaagggttattggtatacacacgccttgccaggaaatccacggaattcatcttgtaagggaagttggcccacaatgtggactgggcgcaggccgcaacaccggacccgccgtaaggcccgccgtccagcacatggtagcatttctttgccagcagcttaccgtctgtcccaaaggcagtgtcaatatgcatgtaaatggggtggcggttgcgcgtggtctggaatacttcttcgcgggacagaatcatgcgtaccgggcgtccggtcatctccgccatcttggcagcgcaaaggccaaaggaataggaatccagcttgccgccgaaaccgccgcccacaagaggcttgattacccgcacctggttctctccaacgccaaggcagcgggcataccagaactggtccacaaaggacatctgggtggacatccagatggtgtaggtcccattcctgtaggtagccactgcgccgtggggctccatggccgcatgtaccatacggtgggtcttgtaatccctgtgctgcacataggatgcgcggtcaaattcctcatcaatatccgtgcccgccttcatcacggactgcatgccgatattgtgtatgcctttgccctcccagtttacctcgggggcattctcctccattgcctcaaaggggtcaaacacccccggaagcacctggtactctaccttaatcagatccgcggcccgctgggcggtttcctcatccacggctgccacggctgccacgtcgtcaccaacctggcgcaccttctcagaacacaatacttccttgtccgcaaactcagctgcaaattctccatttcccaccagggacttccactcaaagtccctggcagtgaggatgcactttacacctggaagcttctctgcctcgctggtgtcaatggacaggatttttgcagatgcataagggcttctgaccatttttccggtaagcatatccggaaacatgatgtcacctacatactggccgtgtcctgttaccttgtcttcagcgtcaatcctgacataattgttctcgccggtcagacggtaaaattccggttttttaaaataatgtttgtcacagtctttatgcattctttgcttcctcctcccagttcatctgcgcagcggctgcctggattgcctccacaatctttgcataaccggtgcagcggcacagattgccctcaatggcttcccggatttccagttccgtaggatgtttattcacatccagaagagctttggcggacataatcatacccggagtacagtagccgcactgcatggcccacttctctataaactgcttctgaatgggatgaagcatcccctccctggcaatcccctccacggttatgatctcatggccgtcgcactccacggccagggtacagcaggagttaaccggcttaccgtcaagcatcacggtacaggcgccacactccccttcctcacacccctttttcgtgcctgtcagaaacaactggtcacgaagaaaatccagaagcgtcaggttatccttcacaatagcatcaaccggatctccgttgatgattaaacttatactatgtttcattcctgtctccctcctagttatgagcattccatggcctgcttaatggcacgttttgtaaacacgcggatcatatccttcctgtattcggccgatgcgcggatatcagagattggatgacaggaattcattgcttcctccgatgccttcacaatcacttcatcggtaagttctttgccaatcagggcttcctccgccccgggcgcccgtaccggcgtggccgcaaccgcgcccagggcaatcctggcgtctgtgcagacgccgtcttccaccttaatcttgactgcgacgccgatgatggccaggtccatcgcctttctgaccgcgtgttttatgtatgcagccctctcattctcagccagcggcggaatcacgatacctgtcacgatttctcccggctccagggaagtctttttgacacccaggaaaaagtcttcgatttgaatgacccggtccttgttgggaccctgtaccaatatcttagctccctgagccagaagattgggggctgtatcgcaggatggggacgcattgcagatattgcctgccatggtgccctttgtcctgatttgtgtggatgccactaccttggcggcatgagccactgccggattcttttctttaaccagaggagatgtctctatggtacgcagtgttgtcagcgcccctatttttaaaccttccctgtcatcgtattccagataatccaaacctggaattttcttaaggtcaatgatatactctggtgatataaccttgtctttcattggcggaatcagatccgttgcgcctgccataaccctggctgtgcttccaagctcaaggaacagattgcacgcctccccgatggtcttaggagcaagatactcgaattgaggtaataccatttacgttttcctccttacacttctttttattgcctgctaattgttacgttctccctgtatcataattgtagaaggaaacgcttccgcttgccagaagtgtatatcacagatgttgcaattgttacaccttttgtctctgtttcacgcgtacatcctgggggaatgggaaatgcaaaaaaacagctgcaataaataaacgaatggccaggctgccggtatctcctgcggataccggcagcctggccataacggatatggaaaccatctgcttgaaatgacagtgaaacgcgcagaatactatactccattattctgcgaagtaattctcaccttcctgattttccccttgatggtcctgtcctgaaggcctgccagaaccagagagcctttgcggttcaatatctccacaaaggtgaggctttccctgatatctatgattcctatgtcctccgcatccacgccctctatgctgcacacagcgcccacgatatcgccggacctcatcttggatttacggccgcccccgatggacagtctggtaatggaccggtccagcttctcccccttatgggggccgggatccggcttctttctctggagggcccagaaagccttttcctcctcttcctctgtctccggacagggaagaaccggaagcggcactcccacatacgcctccgccttgtgaagcgtccttgtctcatcctcagtcaccaggctggccgctctgcctgcctttccatttctcccggtccgtccaatccggtgcacataagtctcccttcccatgggaaaatcgtagttcaccaccaggcccacgtcctcaaaatcaattccccttgcggccacatccgtggcaatcaggtaccggaaccctccccgcctgaatgcatccacatttttaagccgttccttctgctccatatcaccgtggatcatgccgcagaatatcctgtctcttctcagcttctggaataacacctggaccatttccctggtaccgcagaatatcatggcgcgctccgggttttccttcatgagaacgcgcttgaatgccgtatacttctggtcctgtgcgacgccgtacactgactgccggatgggaaggggcgtctccccctcctgttccaggaaaacggaaaccgcatcctttaccgtttcctctgccaggttcttcacatcctcatccagggtggctgaaaaaagaagggtctgccgtttctcaggaaggagccccacaatctgcctgacctcgtccatgaaccccatatcaagcatcagatccgcctcgtcaatcaccaggtatctcacccctgtcagcttcaggctccccctgcgcacatggtccatgacacgccccggtgtccccaccacaatatgggttttctggcgcagtgtctgtatctgcttgtcaatgggaaagccgccgaacacagccggtaccttcagccgttttttcctgccaatcctgaatatctcctggctgacctgcacggccaactccctgcttggctccagcaccagagcctggggcaggttttcctcccagactatctgttcgcagacaggaatggcaaaggcagccgtcttgcctgttcctgtctgggaccgcaccaccacattcctgcctgccagcacatgaggcagcacctcctcctgcactctggtgggatgttcataccctaacagcgccagcgtctccgtgatttcaccggataaaccgtagccgccaaaacagcggtccggttccgttttttgattattttccatatatctccatttctttacaagggagcttctacctgcgcccgccttctatatcttctttcacaaacatgatcaggaagctgaccagcagaagcccgcagctaacccatatggtgcgctccctgagataggctgtaagtacactgcccatgacggcacccactgcaaatatgccgatgactccatagtagcggatacatttatcccgatggtcctttttgcccgtatggcggtaccagtacaggttttccgtggcgctgcgcagatttccgatacacatggtggtggcataggggcttcccttgatttttctgaaggcattgacctgaagggcgcatacaaatgagacaatgatattggctgccatattcatatcctggggcaggaatcccaccacaaaaagcaatatgatctcaatagccacaatcagctgcctccaatggaaccttctgtcctgccggtgaagccgttttacatgctccgccatatacacgccgccggcaaaggccagaacaggagccagataccgcacagccaggttccactccctggcagccaaatggcttcccatgagaacgatattgcctgtctgtgcattggcaaacacatttcccctgcagtaatacgtataagcatcctggaaccctccggataaagtcaaaaaaatacccgttgacacagcctccgacatctgtccacgggtacccatactcttttccatctctcctgccgcctttcccaagttaggaatctgataaatctgattcttccaactcaagattttaccacagttcagattaaaataaaatagttaaatgtttcacagttttatcacgcttcaccaatctggctggtaatatagtccggtatctcctccgggcagatatccagggcagtggccagttctccaaacagcagcttccgggcgctctttacgccgtcccgctcacggatggacaagggctttccctttcccctgcggttctgctccatctctgatatctccttaatcatagatgccagttgagtacaatcgccggactcaaggatctgcctgtatgcctggggtctttccttgtcgtttgcatactgctttccctcaacagacggcagggccagtatgaactgctctgcttcctgcctggtcatgatttccctcatctttacctttgggctgtccaccggtatatagatggtggtatcctggtcaaacttcggtacaaggctgtaatacaccttgtcattattagagaagtcaggtttcgatatgccttccacctggcatacgcctacagttccatagagaatatattctccttttttaaacaaattcccacctttccgaacagatactgttcaagtgttaacggggtatctatatagtatatcacacttttccctatttgtaaaatgcaggcatccgacaaaggtatccggcacgtaagccggcaaaggttccggcactccggccggcggcattccttcggtggattttcagaatcatttcaaagtcctgctgccgaaacaacgcaaaatataccccggtaacatgataaactttctcatgtaaagggctggacaattttacaaaattattgtattatgtcattacatagttagttctgactaaccacctggacaccaaaaaaggaggattttacatgagcgttgtcattatcggaggccatgaccgcatggtaagccaatataagaagatttgcaggaattacaagtgtaaggcaaaggtatttacccagatgagcgccagcctggataaacagattggcagtcctgacctgctggtcctgtttaccaacactgtgtcccacaaaatgatacgctgcgccctggacgaggtgggaaacggcacggagatcgtccgctgccataccagcagcggcacagccctcactgaaatcctggaagaaaaatgcgcggtctgtgccctataggcttttcaatcaatacccctgcttcacctccagcatctgtaagccctccaccacggagcctgcgatgcatctggccttgtccgatatggtgaagcagttttcatattcactttttctgggatcaatgtcagcgatcttaaatcccttcactaccggatacccgtcttttatgatacccctcaaaagccctgtcagggaagcttccaccgtgacctcgccctgtccggtcacaatgactccaatggcctggccctgctccaccatgtccccaatcagggccttgccaaagaaaatccccttggccggggcatggatgacccgctctgccccatagccgccgatgactccgggaattccggtattgggggcagcgcttccgtttccaatgatgcgtcccagattgtggcctctcatggtctctatcacaaggtccacatcctgaccggctgtgaagcccggcccgaggccgatggtcttatccgccatgtcccttgtggtccccaggttcttcttggccagtatggcatccaccagagcccagggacgcactttttcaagcactgcgcagttctcgtcaatcatgacgggcactgctccctgctccatgatggcgcaggcttccttatagccggaagccttgatacaggtaattccctccacctcagacgtaccgtcatatactgcttcggaaaaggccacgcatctgcggattgccgaggggtatcccgactccagcaccagcaccgggtatccgcagcggtaaagcctgtggatggtaccggtggcaatatcaccgccgcctcttacaattaccagttgttttgcacgttccgtcattttacatccatttccttccatctttaattattcgtctgcctgttcagctgactgcttcagctcttccacccattcctgtgaaaagtgctgttcaaataaccggtccagttcctgccttgtctctgccatgaaggcgtcgtatgcctccagaagccggactgcctgaggcgtaagggtggagccgcctccgtcccttcctcctgtctcccgctccgtcagcatgaacccccatgccttttctgactcctttaacatcttccaagctttgctgtaagccatgttcatggcctgggccgccccctggagggaaccggtggattccactcccctcagcagtaccgacatgccgggtccgaatgccttattttcaaaatataatttcagtgatatcccatagtgaagctgattctggtccaatgatatgcccccttttttgaatggttatgtttttttaagaataacgtcctcaaagataaaagccgggcaatcgccggcttttgattctctgtgcataaagctccaaactgctattctttcactccctttattatagcagatttgtctgattatgcaattcttttttcaggctgattccctgccgtttcataacctctgccagtctctccctctgctccggctccataggtgtcagcggaaggcgcaggtcatccccgcagacccccatcaggccaagggccgtcttcactggtatggggtttacatcccagaacagggcttccatgatttccagaagctgaagctgcatccgtctgctctccttcacatccccatccaggtacagacggcacatcttatgtgtctctttcggcatgatattggccagcaccgacactacacccttgccgcccagagacatgatgggtacggtctggtcatcattgcctgaataaatgtcaaatccctgcccgcacagggctgctgtcctggcaatcagggacaggttgccgctggcctcctttgtcccccgtatattgggatgctccgacaaaatcctgtaggtttccggctgtatggttaccccggtacggctgggcacattgtataaaaggatgggtatgctcacatggtccgccacctgggtaaaatggcgcaccagcccctcctgggatgccttgttgtaatagggagtcacctgcagcagggcatccgcccccagctcctgggcctttctggacagctccaccgcatgctccgtacagttgctccccgtacccgcaatcaccggaatcctgccgtccacctgtcttacggcgtagcggataacagccattttttccttgtcgtccagggtggccgactcccctgtggtaccgttcaccaccacagcgtccgtgccttcccttatcatccattctaaaagccttccaaaggcatcaaaatcaagatttccatatccgttcatgggcgtcaccactgccgcagcgctgccctcaaaaatactgtgactcataaacatcagtcccccgattcaatcattatactatgaaaatatgacaaacccgtctttatggtaccaattatttccttctgtcatatagtgacaatatgaatccaatctcataaggagagtatccatgcatcaattcctcatactgggcggagactccaggcaggtttgcctgaaccggcttctcagtcagtccggtgccagtacctgcttttactatgacagaccctcttcccccttctctctcagggaagccatggaagattcccatatcatcctctgccccgttccctttaccaaggacggtaaaaccattttctcagaaaacagcctgcccggcctggaaatacagaccttcacggcctgcctgaaaaacacccatatactctttggagggaatatcccttccgctgtcagggagcgctgtgaccttctttccattccctgccatgatttcatgaagatggaggacgtggcatggaaaaatgcggttgccaccgcagagggtgccgtggcagaggccatatccttaagtccggtaaatctttacagaagccgctgcctggtaaccgggtacggcagatgcgccgccattctggccgaccggctaaagggcatgggagcccgcgtaaccgtggcgggccgcaatgcctcccggctggtcccggcccattgtatgggatacgatacctgcctgttaaaggaactgggcgccgtcataggagaatctgactttatattcaacaccataccgtccctggtactggacgctgccctggcaaatcaggttcaggaaaatgcggctgtcatcgacattgcctccgcgccgggaggggtggatttccaagcccttgaacgccggaatatacgggccagattatgtcccggacttcccggccgctgctcacccctctcctctgccctgattctttatgaggccgtcatggagcatatccgggattcacagactcagtaaggaataaggagaatactatggaattaaaaggaaaacatgtaggcctggccgtcaccgggtctttttgcacctttgcaaaaatagaacaggaaatcaggcatctgaaggagacaggggccatcctgcaccccgtcttctctggaagcgtccagtccacggactcccgtttcggggataccggccagtttatggaccggatcacatccatcacggaaatgaagccaatactgaaaatcgaggaggccgaacccattggtccaaaggggtacctggatgtcctcctcatcgctccctgcaccggtaacaccctggcaaagctggcaaacggaatcacggacactccggtccttatggctgcaaaagcacatctgcgaaacggcaggccgctggtgatatccgtatccaccaacgatgcccttggcatcaaccttaagaacatcggcctgctgttcaacatgaagaacatttactttgttccctttggccaggatgatccggtgaaaaagcccacctccatgattgcccataccggactcatagaggatacccttaaggaggccctggagggcaggcagatacagccggttatacagggggtgtaggactcttccgtcaaaatctctccgctgcaaaaatcactggggccggaagcatgctgccacagcatgatcccggcccctcagcagacatccgcgccagtatttcgctcaatattatatattcccttaacgaaagaacatgacatactgttgtcatattcaatgttctatccttatagaaaaaggccctgaaggaccaatctgtcgaatcactaaattcagggagccggcacatgatgagccatagaaaccgcccatcaggccaggccctatgatacaggcatacgatacggaggaataaggaaatggagcttatcaaaataacacacggcaaccttgaacaggaacatatctgttgtgcgatatcaaacaacaaagacattcaggtcatgacaaaaaaagcctggctcaaagaaagacttgacgagggacttgtattcttaaaatgcaatgtgaggggaaagtgctttattgagtatattcccgctgaatacgcctgggcgccgatagaagcggacgggtatatgtatatcaactgcctgtgggtatccggacagtttaagggacttggctactcaacgcttttgctggacgaatgtatccgggacagtaaggaaaaaggtaaaaaaggacttgttatcttatcctcaaagaaaaaaatgggatatctttccgaccctgaatatctgaaatataaagggtttgaaaccgcagacgcggcaggcccctattttgaactgatgtatctggcctttgacagaaatgctgacaaaccatgtttcagacatacggctaaaaaccgtgaggacatgccaaagggcctggtcctgtactacaccagccaatgtccctttacggcaaaatatgtgccacttctggaaaaaacagccaaagaaagaaatgtggagcttcaaaccgtgcatatacagacaagagaggacgcccaaaacgcaccggctccctttacaacattctcactgtttcgcgatggagaactcttaacccatgagatactgtcggaaaagaaatttgataaactaatatcttaggctgacagcggttaaagacacatatcctgccccagcatctccctaagtctcacctgggcttcccggaaccaggcatccccattccctgaggccagcagcacataggccgtcttgcccagcagagactccagataccgtctggttcccccatccccatcattcaggtatgcctgccttccggtacgcgtcagatgctcctttgccccatatttcatgcagtaataaatctcctgccgcagacgtcttctgtagggggcgggaacccggacccgttcattcaccaccaggccggtcaccacctgcctggttcccctggtcagaatccgggttttcctcagattaggctcaaatcccatggacctgagaaaaccgtatacctttcccttcacctcagaaccatcaaaaacacctgaaaatgtcatgtcatcgcaatacctgctgtatacaatttcccgttccccgcaccaggcttccatatactcatcgaagggcttcatcaccagattggagatggccggagacgtaggcgctccctggggcagacggtcatggcagcagcaaagggaggccagcatgacacccactgccggtggaaaataggctgccggaaatgcgtgatgcagcaccatgggaaaggtgatgctcccaaaaaaatcctcaatatccatcttcatgacaatcttcctgccctgatgcttccctgcgttggcagccaccgaagcccccttcctgtaagccgccgcgctgtcggacactgtaaatccgtccagcacatgatgaagcagattcctctgcacatttttcagaaggggatccggcaccagcagggtcctgaagccgccgcttctcttgggaatgttcaccctttggtaatgtttttccgcgtgattgctgagggcatagagacagcccattattttttcaggaggccagtccccggcccctaccagccggaaggaaagcatcatctccctgcactgctcagcgctgcaatatttccacaaatccgtccgggccatatctcttacctcctggaacccatgccgattctccggatcatttcccgggtcattttccgggtcattttccagatcatttcacagatcaatttccgaattagttcctgacaaatcaaacagttattacaaaaacaaagacaggagaagcaacacgtatccggataccgtaagatgcataggggtaccgggccgcaaagcggcgggcacatgaaatgtgcggatgtaccacggcgcagcttgcggacttatccctctgcttttcactccgggcagcgactcgctgtccgtccaggcttactgcctatgcaatattcctgaaaatgctgttgcttttcctgtctttgcttatgccataatcataggcaaaaaacattggattgtcaatgtacttttatatatgtgcttttatatatgtcccttttaagatgcacttatcccttaacagcgccttccatcataccggccttctggaacttctccagaatcaggtacagaatgatgataggtatgataaccagggtggtgcctgccagtataacgggccacggggtggataatccctcgctgaccggcagcagtgatatcgtcaccatcagcgtgtattttgcctgcttcctcaagtagagcagaggccagaagaaatcgttccatctggcaatcagggtgatggctccccaggacgccatggccggcttgataaccggaagaatgattttggtgaagatgccgaagtcggaacatccgtcaatcctggccgcctccaccagttcatccggcacatcagttatatactggttcatgtaaaagatacccactgccgtggcaatcctggggattaccagggaccacaggctgttaatcagtcccaccttcttcatgatgatgaacaaaggcacacttcccacctccggcggcaccagcatggtggcaatgacaaagtaaaacaggaatttcctgccaggaaacctgtattttgcaaaggcaaagcctgccagggcgcagaaaaacagggaggtaatggttcccatgatggtggtgaacacgctgttgaaggcattctgtccaacaggaatcatttcaaacagacgcttaaagttagccatggtgggatttgacaccatcagggaattaaatcccgtgatgctctcactggtgctctttatggaaatcaggcacatccacacaatgggaaacaggcagataagggtgatgaatatcagtacgccgtataccaggaccgtggacgcatttttctttctgttcattttattccctccttctatatttcgccctgcttgtgtcttaccacaaactggatgatggatatgacaatcagaataagaatcaggataacgccgattgccgatgcataacccatgttgaatacattaaagcctgactcatacatgtactggaacagggatgagttggaggttcccggtcccggaaggatataggattcattgaacagcttccacatatccactgtcagtgtcacggaacagaaaaacaggatattctttaaggacggcagggtgatgaaccagaactgctgccacccgttggcaccgtccaccgtggctgcctcatagtaatccttggatatgttgagcagtcccgataagagaatcatggtgaaccatggtgtatatctccagacattcaggataataacaggtatctttgaaaatgtggtgctggtaagccaggggatcttgctgcccccgaatattgtcaccacctcattgaccagacccacgttctcatcaaacagcattcggaaaataagacccatggcaatggctgcacatatattcggaaggaaggtagccgtcttgaaaaatgccctggcggaattactttttaagtatctgctgtttaacagggacgcgatgagcagggcacagaagataatgaataccagtccggtgagccagtagaccactgtgttgcccagggattcccagaacatatcgtcaatcagcattttcctgtaattgtcaaatccgcagaaatccggagtcccgattcccttccagtttgtcaggctgatgtagaatgtccatatggtgggcaccagctgaaatacaagaaacaggataaaaaagggcatgataaacaaatagggagccctgtattttttcagtgcttttaacattcgctgcctcctccttaaggtttataaaaggctccctcctcggggcgggagccttttttgcattactggctgatttcagccttgccgatcttagcttttaagttcttatccatgttggcgatagcgtcgctcatggactggttgcctgccacgtacttctccagctcagcagaaatgatttcatctgcctctgcatcctgaggtgttaccaccaggtttgcggcgccgttctcaaggcacttgccctccatctcgcggaaggactggccgccgtagaagtcagatggctctttccagaatggatcctccagcatttccttggatactgggttggaataaggagcgttctgctcttccatggaattgacccatacttcctttgcctgggtgtcaaaagtgaaatcataccacatctggcggaacagctctgaataaggattgtcgcccttctcgatgatggccatgtactgggatacaggagcgcctgccttgtcaacgccttcaaacgcaggagctgacatgactctccactgtcccttggtggcttcgcagttctttctcatgaattcatcccagaaagcaccgatgcagaaagtagctacctgctgtttgttgatggcgtcataaagagccggctccatgatggtggtctttaaaagaagtccctcggaattcatggtatccagggcgcctaatgccttctgtgttccttcgtcgctgccgattacaacttctccgttctcatcccagattttagcgccagctgacggcataagccccctgcggccccagtatctccaggtcttgctggttgggtcgatgtaggaaagataaacttccccgttgctcttttcctttaactggcgtcctgcctctatgtagccttccatggtattcatctgctctgcgtccacgccgtacttgtcaaagatgtcctggttgtaaaacagcacctggggccttacggaatccggcagcgcatagatgcgtccgccgatggtggcgtctgtggtggctccatctaccatcttatccagaagaggagtcagatattcagtctcatcctttaaaaggcctgcgcctgccaaatccatgatggttacagggtccagcatagctgcgtcgggaagatcctcggtggctcccgacagtgctgtcatggtaatcttctcacggatgtccgcggttccctctgtctggacaaactcaatcttcacatccggcgcaatatccttgtggttctccagccatgtctcaaaccactgctgtctgtactggggatttcccatggcgtaaaccaccagggttcctgcgggatatacggtcttttcactgtccgctgcctctgcgcccccgtctgccgccccgctctggtcaccctgggcattctctgccttgggcgctgcggttgtggccgcctggtcggtcttgccgccgcaggctgcaagggagcccaccaccatggataccgcaagtgccattgctaactttcttttcatcattctctgttcctccttttgatattcactgttacattattccctggctgcctctacggctgcctttaaaaggtccatatcctgctctgttgcaagggtgcagtcagctcccagaataaaatgagttcttccgaattcccggatgaccttccttgtctcttccttcactgcctctgccggtccgtccaccagtacgccgtggcggttgggaaggccgcccatgatggtctttccagcaaacatcttccgtccgtcctctaaactgaagggtgcttcatatacgccccagttcaccacgtccgcgtaggggccgtaatccttatagcggtccatgttcagctggtccttgcagatgtggaggaaacagtatcctcccgcatccttgatggccttcataatctgcaggtcaaagggcttaatccatttctcaaattcctcatccgtgaagaacctggtctcgccgcccagagccgcataatacacgccgtccacgcccagctcaatgtatgttcttgccagttcgcacatcacgtccgcaatgcgtttcattcctgccagaaccgtatcctcatcctcatgaagcaggcggcagagcttctcccttacctggtcgtatgtatagttggggtccatcttttccaggggatggatggatgatgcggtaataccgtgaagtgtgcccaggataaatgcatccctgtcgcatccagccagaatcttcttaaccagctccacctggtcctgcatgaagccgtcctccatggtcatctcttttaccatgctgtaatcggatccattgttaatctcgcccatatagggaaccagattttcattcatgattttaaggatgtctgtatcagactcctcaaaaaatttcagatgggcttttacggccgcgtctccaaaagctgattccttaggaaaatgcagggaaaatccgctgggtatcttgtcaacttcttctccccggatagctgctgtcactctctctttttttgtcatggctgtctcctccattaatcatatcactgatgtgattagtaatcttactaatcgtgattataacactgccgacaagccgtgtcaaatattttttatccattttattaaaataattttatcatccgacataatttttgtttattttcacgctgtatgcaattttcattcaaaaaaaggatgtaaaattgacggcatcaatcttacatccttagtatttatgcattttcccgtatccaggggcctgttctcaaagggaatagttctcctgaatctgctctttcacattcagtatgtccttctggagcatttccacggcccgctccgtatcatgttttaccagggcttcaatgatttccctgtgataaaagctgttggattctgcgttctttttccaggctgtctggaaatattgggaaatatacgaacaggatttttgaagggctgcggcaatcacatcgcatatataaccgttcccgcccatctcacagagcttcaaatgaaaatccgtgttccggttccaatgaatggccaccatcctctcatggttatcctttgtgatggtatccagctgtcttaaatcttctatctgctcaggggtaattctctggcacagccgcctcaggttgcctgtctccacatcaattctgaattccagaagatccagtatctccttcagggtcacaggaaccacctgatagcccacccttggtatacttttcaggacattatccttgcacagctcaataagggcctcccgcaccggtgatttgctcatggcgtacttttccatgatttccccttcatggatgatatcgttaggcttatagatgccttcttctatctcccggtagattccctccaccacggtttctttcagggttttcttcgtcttcatcttcttttctccaatgccttcccttttttataaacccgttccgccagcctgtaggatatatcataggccatggacacatccccttccatccagtccttccctgtccagagctgcctgaatccactgaccgcttcctccgtcatgccccccggcgtggcgtggtccttaagctttgcttccaggaactctctggtctccagctgcaaagaaagaagatgcagctcaaaggacctgggggcaataatgtccgcgttcccggccgttcctgctctggtttcattcccattcccgtttccgccttcccggccgtcatatggtccggctttgtttccggcctccccgcccgcctcgcgggcaaaggccagggcgccttcataccagcccttttccagccaggccagcctgtccatctgctgcccgtccatctgctgcccgcccatctgtcgcccgtccatctgtcgcccgtccatctgtcgcccgtccggcgctgcggcaggcgtaataagaccgggaaggcccagccttctgcggttcagcgcatacaggatgccggccgcccgggcgcagccgccttgaccgctctcatccccataatgcggttccagcccaaaacataagaggtacagcatatgataggtaatgctcatggacagcagacgcagggattcatccggcgtacattcaaatacctgtcctaggggtttgagaaactgtctgaccgcgtccagctgctccctgccgggaggacagccggggtcgtatgtaatcttattgaaagccagtgaatacacatccaggccgccgatcacagtctccatggccggcaggatgcatacggtcctgacaccgtcacccaggatcctggtataccattcaggacgcggactaggagcaaaggacaacagcagcagccctccaagcccttgttccctgcggtactttacatagggctttatggtatcctccgccactcccgccacctcatggggcctgacggaaagcaccagtatgccgggcttatattccttcagcttatccaggcaattgcccgctatgatttcaaagccgtatctgtgcctcagctcttcaatccccctggaaccggccttcaccgcaaacatccgcttttcatatccttctcccagcaggcttctgtagcagggaaccatatacgccccaatccatcccataccaatgacagccagcctgtctgctccatcacccatcatatatttccatccttttacaactacatcctaaaattataatctgaaatgcgtcaggattcaataggggggattataaaaacagctcattttcccgtctgatatccctgacaggggaaagcttctgctccagcatggcacaggcctgctcaggcaggcttctggccttcaccggacagacggaaatacagcgcatgcagaggatgcagcgcgcctggtccgtggaggaaggattgcttacagggatagcctgcacaggacatctggcagcgcacagcccgcaggatatgcaggatgcgttggtaaggggaatcaccggcatctgcttccagtcacggtaaggacggtttcccggcacctgaggctcctgccagccctcctcttccagcttttcaagtatcctggccccaaagtcagccatttccttccggtcctgattatccggtcggccggccgcgacatcccgtaccatggaatgttctgccagcagcgctgtccctgccccaatcctgaacccctgggtctttaagcagtcatccagttccagaagggcatcctcaaaggccctgttgccgtagactgccgcagtcagcgccactgccccgccgcctttcaggtatgtaagcttttccgccgcatatccgggtatcctgccgccgaacacgggcacgcccacaatcacggtgtcctccggcccaaaggaatactctccctccaggctgcaaaggtccacatccttgaccttcttccccatctccatagccagattgagacaggccttcctggtgccgcctgtggggctgaaatacacaacggttatatgttccatcttattcatactgttacctccggaattttgtatgttggttcgatattctagttattttatcacattccgggaggaaaagcaccatctgaaaaacagaatctgtgccggcctgtaccggaatccattcctgtttaagcccggacggctctcccctcatgcagactgccgcccttcataaggaaaagcaggcgttttaccgcctgctttcaaaaatctagtcaactaccaccctggcataggaagccatggcctcctcgctcatctcctggccgattccgggccgttcattcatcacatatctgccgtttaccggagcccaggcatatttccccgctttctggtaatctgttttgaaattagcgcagtgctcctcatgaatgacaaaattaggtatgacggtctccacatggagggccgccgccgtggcaattgggccgccgcacacgtgaagctggatgccgatatcatatacattggccatatcgcagattttctttacttccgtgatgccgccggtattgcacaggtccggctgggcgatgctgagtgtcctgtcctcaaagaactgcctgaatccccagcgcgtatagctcctctcaccggttgcaagggggatatcacatttctgcttgatatgcttaaatacctcaggattggaaggcatggtaggttcctcatagtacatgatgcggtaaggctccagggattttcctaaaatcacggccgtgttggcgtcaagggtggaatggatctctatgataatgtcaagctcgtcacctcccgcctcacgggcagccgcaatgcgctccaccgcaattttcctcaatgcttccggataagctcccttcagattgtcgccgcgttttaagtacgcctggttaaaatcctctcttgataatccggcaaagcacgggtcaatcttaactgcatcgtatccgtccgccatggcatcctttacagcgtcatagtaatccttcggttcaaactgaagctcagaccggtccagttttgtaataagggtcctccaccccatctgcagctgggaggcgtacgcccggagggaatcatgggtctttcctccaaggagcttataaacaggcagccccaatgcctttcccttaatatcccagcaggcaatgtcgatggcggccatggcggcagataccgtaacgcccccgttcatgccccagaacgtatggcggtggagatgttcataaattttttccgtgtcaaagggatccatgccaatgaccatcttggcaaaatcctggcagtttccccacgccgcgttctggcagctgccgtaggaaagcccggcctcgccaaaaccgctgattccctcgtccgtgtttaccttaaccgttatgaacgctcctttatagcattccacacttgtaatcttcatcttctgatttccccctttaattaagtgttatctggtcttccgatgcaagcgccttgtcagaccattcgtttccaatgccaatatcgtccgtcacgtccagatacccattcttcggcatcactacctttgctgtaagttcctggttggaaggattcatactgcgcatatgctgttcgtgaatgacaaaattaggtatacatgcctcaagctgtacagacggcggcgtcagcaggtgggacgcgcatgtatgaatctgaacacccacatcaaaggtatacgccatatcgcagattctttttgtttcagtgattccgccggcattgccgatatccggctggattacctgaatggaattatccatgaaataccgtatgtattcccatcggccgaacacccgctccccatgggccagcggcattttcacattatcctttacatatttgttattgtagaataccggcgtgttaggctcctcaaaatagtaaatattacagtcctggactgctgccgacagctggattgccgaattggaattggttcccgcgtgattttcaataataaggtcaaccttggggcctatggcctccctgacagcatggacacggtcggagaaaacctgtacaagctcaggaggaagcaggcccagacggttggtctcattcaatatattgcccttttcatcccagttaaggaaatcaatcttaatggcatcgtaaccatcctgaagggcaagcctggccctgtccacataatcctgtacggttacggccggggaatctattggcccccatccaaactgcagttgtgaggcatagcagcgcaccttatcccgccgctttcctcccaggagtttatataacggcacatttagcgccttgctcttgatatcccacagagcgatatcaatggcgctgactgcgctgtaccagaaggcaccgccgttttgcccccaaaaggttctgagcatcagctggtcccacagcacctcattgtcaaaggggtcttttcccgagataaaaggccacatatcctttatcacgccaaaggccccgtaggttgcatgaattcccgccacctctccgtccccgtaaattccttcatctgtgtaaatacggattcccaccaccttactctttttaggaaactcaggcgtttcagaacggttgtattcggccaggaataacttcgcgcttgttattttcatatttttcctccttgtatcatgagcttttgtttataaatccgctaatagaaaatctgccccagcagcagtccgtaaccatatgcaatgattgaaaatataatgaccggcacaagggccctcacaacgatgtctcccagtgtggtgtggtaaaaatcagccgcaacaaaggagcagacgtgggtgggagatatctgcattgcagcccacgcgacactcatcagcatgacaagaaacggaatccctccctggggaaacgccaaaaacgccatgggcatgcaaagagcaatgattgtctgggagccgcttataactgtgccgataaagaacagcaggccgaaggacattgtcatggaaataggaaactgtcctataaaatcaggcagaagccctatgacgccggtatacgacaatatgcctttaaaaagcattatcaggtacatgttgcccaataatatgggttccccagacctcaccataagatccggaagatcttttaagctgaaatgatcaaatatataattggaagcaattaccaggggcgcggctatgcacacggaaagattaaatataataatgattaagagcacagctatcagggtccacaggtttttcaccagattgataatttccgctttcttatcaatggtctcttcaagcaggggcatttccctgggtattccttttaaatgtgtaatatataccacaagacatgccgccaccaccataggaatcatggccagcacaaacacccccgcattctgtccgctaagtgtaagtcccaagaggaccgccggaaaggttggaaggaacatttccggtatatgtctgtaatagcaggatacaaacgtcttgtttttatcatccatgtattccccgcatgtcctgtctaccatatccgcgcagattgtcatgactgccgcagacggaagaagtcccataattgcaggtgatacaatggtattcattctgcggttcctgagcaggcggttaaatgaatccttcgcgtttgtcagccttccttttttctccagcataagctggagaaatatgatgagatagaagctcagcagcacatctattgtatcccaggccactgtctgccttcccagaacaaccgccgcgtccttcagattgacccggaacaaaataatggtagctgctatcccccctatcattgccacaaacagcggctttttcagccatataatcacaacgattaccagaaacactatggaaagatataggatatccatgtttcctcctgatgcttagtctaatttctccagtctgtccgggatgaccggctccatggtctgcgtaacgcctgcgtcacgttatctcctgcatcacacctgcgccatccccgctatcatccctgttatcatccccgccatcatatcctgccaagcagcaggagtgaaatggccggaataaatgccaccacgaaaaatgctgctatcaggccaaacagaaggggcatttcggcctttgttatcttgtctatactgatgcctgtcagggatgaacccacaaacaggttgattgccacaggcggtgttacaaatgcaatagccagggccaaatccaggatgataccaaagtgaatgggatcgcatcccacctgggttacaacggataaaagggtgggagccagaatgattatggccggcgttgtctgtatgaacattcccacaataaacatgataatgaatatcatgaacataaccacataataattgctggagatactgaacatgaaatcagcaatggtctggttgatgttcagatacgcgaatacagaaccggttgcctttgccggacacatgatgaacatggtgcctgctataaacgccgcattgtccctgaacacggcccagagcttctcaatcttcaactcccggtataccacgaatccgataaatatgccgtacacaacagccaccaccgctgcctccgtcgcagtaaagaagcctccgtaaattccaccgagtataataaccggcatgattaacgcccactttgcgtcccaccaggcgctgaccgctgatttgatatggaaatggttctcgcccttcaggcggtgcttcctgcagtatacataattgataaggataagtactccgcccaccacgcaggatgggagcagtccggcaatgaacaaatctcctaccgactgattacaggtgacgccgtagagtaccagaggatagctgggaggcacaatgactcccagaccgccagcacagcatgccagagctgttgcataatacttgctgtacccttcctgcaccatcataggtatcatgatggcgccgatggccgccactgtggccggtgcggaaccggacaccgcgccaaagaacatgcatgctatgactgtaaccattcccagtgaacctgtaacaccgcctatgattgaattggctgcactcaccagacgtttggacagaccccctgtttccatgatggtacccgaaatcatgaaaaagggcagagccaggttggtgaagctggcaactcctccatatgtagtctgggcaatgaatgaactggtggtaaccgggtcaacatttatcagcacaaacatactaatgaacattgccactgcaatgggcacaccaaggaacatgagaccaaacattacaataaacataacacctgtagccactatctcacctctcccttcacagcagccgcctcccttgccgccttcttttccagataaatccgctcacattcatcaaggtccatcgcaggcttggaagcgcccagattggcctcattctcatgcatgagttttatggtatcctgcgcgattcttacgacactgagcaccagcccgataggaatgatggagtataccatctgctggggaagcctcagcagcgtggtctggctgtttccaagtctcctgataatggtcatgacaatatacagcaaatatatatcaaaagcagcaaagaccagattggagatgacaagcattgcctttttcaccttaaacggaaccatttcaagtataaagtcgatgcgcaggtgctttcttttggtgacagccgcggacatggcaaaccaaatcatccacacaaaagcaatggtcgcaacctcctccacccatgcaaaggaatgcttcagcgcataccggcagaacacgtttgcaaaaagcaatacggtaagggctatgaataacacagcggatatatacagctctatattatccagaaaagtcttcaggtcgaactttccatctttcatacgatctacccccgcttatttctttgcctggtaatccagcacaaaatccaccagcttattgtaagcttctgagcccatctgttcttctacctggggccacacagacttggccacatcctggaataccttgagttcatccgttgtcagttcaatcaccgttgtacccttggactgcatctcgtcgaagaatccatcagataaatcttcggtcagggaacggacatacatctctgtctccttccaaaggtcctggataaataccttgtcctcctccgacagcgtactccagaataccggactggcagccatgattgtggttgtaaaattatggttcgtcttcatacagtagctctgcatctcataaatcttggaagaaacaatgttggagggcggattctcctgggcatctaccagtttctgctgaagagcggtgtagagttccgcatagggcaccggcgtcacgctggccccgaaggcttcccagcagttcatttgaatcgggtccaccatagtgcggattttgacgccttttaaatcagccggggaatggatttccttatttgccgtaagctggcggaaccctatatccaggtgggcaagaggaatgcactgtgtatcggcctgggcccgctggtcccactcctggcgcagcccggaatccaggaccgcatatgcgtcgtcataatccatatagagataaggaatatttaagcctgcgtaggccggggtataatcagcccatgaaccgcagttcagcataaatatctcatacgcgccattttgggcaccgccaatatattcctgagtggaggacgccagctggccgtcagtgaatatctgtgtggtaatgcggcccccgctgcgctcttcaatctgtttgcagaaataaatcattccctttccagtctggctgattccgtctccggcaacatcccctgctgatgcattggtggcaaaacggattttaaatggctccccctgtgtgtggtccactccgtccgcgcccactgaacccccaccttctgatgccttggaatcacctgctgtagtggcggcagcggcagttgttgcggcggcactgtttgtattagagtttccgcaggctgccagcggcagcagcattgcggttgaaaccatggctgcaatcactttcttcatcacttttttcattctagttcctccttttgataaaattgttgtctgaaacctgccttaaccaaaccgtgattcctaatattttctcttatccacccccacctgcttgaatatattgataattcaatctataattatagtgccaacgagtatatttactgatttatttaatataattcaaccatatttatgcaattattacaaattacttttttttgccaattaataacttttggaaataggagggcgtatgaattaccagcatctggaatactttcttaaagcagctgaataccagcactacacgcgtgccgctgaacatctgcatatcacacagcctgctcttacaaaggccatacttggcattgaggaagaaatcggcgcacctttgttcatgaagcggggccggaatattgaacttacgaaatatggaacgattttttttgattatgcaaggcgttcccttgaagaaatcaaccatggaatatccgccgtaaagcatcaggtcaacagtgatctgaataccgttgacctgtctgccttatgctccattaatacgacctttttgccgaagaaaagcgcgcagtttcaccttgcctatccagactgcagcctaaacatcacctttaaatatacaacagctatcatcaaggatgtatccaactataacagcacctttggtttatgcggagagtttgacaatgaatctgaatataccagcctggaaaaaatcctgctttacacggaacccgtcaaatttgtcataagcaggaatcatccactggcgcacaaaaaatccgtagaggccgccgaactgaaaaaccaaccatttgcagtctataacgtgagtaccaacggtaccaacaggctgctctatgaattatgcgacggcgccggattcagacccaagaccctgacagccgcttacaatgactatgggctgattaacgaggtgatttcaaaccaatgcatttctattgtctcatataccttttacaagcaattccaaagcctgggatttacggaactgcacatcgccaccagtatcccccttatccagaaaatatatctggtatgggtcagggacgccaatctttcccctgtggcaaggggatttcgcgagatactgatgagcaaatgacctccctcactaaaaaagtgcataaaaagggtgcaaacgcagataaatgatccgcatttgcacccttttcccaacttcccagccggttttattccaccgttattccccgctgattacagcccatatctcccgcgcttcacaaacttcccggccttctccaccaccacctgatggtccttcaccacctgggtaccgcgcaggaacacgctctctatgcgtgccgtcagcttccttccctcaaagggagcgtaatccacattctgtacctggtccgcagccgtaaccatatcctccacaccggtgcgcatgacaacaatgtccgcgtcgcttcccggggcaatggctccctttgtgggatacattccgtacagcttggcgggattttccgacaaaagctggcacattttttcctttgtaattcttcccgcgtccacgccgtaggtgtagagcagcgtgccccttgtctcaactccgggcatgcctcccggaatctttgtaaagtcatccttccccagcgccttctgctctgtggtaaagctgcagtggtccgttgacacggtctggatggttccgtccgccagagccttccaaaggcatgcgctgtcctcctgctttctcagaggcggcgcgcacacatacttggcaccttccatgccggcaagcccgtacaggctatcatccatgagcagatactgggggcatgtttccgcatataccttctgtccccttctcctggcttccatgatcacgtcgtatccctcccggcaggtgagatgcaccacaatcacagggatatccaccacctcggccagcctgagcagcctgtcaatggcctctgcctcagcggcagccggccgggtggccgggtggctttccacgcccattcttccggcagcctttgcctctgcctggagagcagctatcataccgctgttctcacagtgaactccggtgattcctcccacctccttaagcctgcgcaggatttcaaaaatagtcttgtcgtccacctgggtatcgtatgtcatgtacagcttaaaggaggtgattccggcctccatcatgtcgtcaagttccctgctgaccgacgggttccagtccgatatggacatgtggaatccgtaatcacaggaacacttgccgtccgccttctcatgccagttcctgaggccgtccgccaggctctccccttcatactgggtcccgaagtccacgatggtggtggtgccgccccgaacagccgccctggttcctgtggcaaaatcgtccgcagtaaccgttcccgccacatggaggtcaaaatgggtgtgtgcgtcgatgaaccccggaaagagcaggcagccttccacatccacaatctgggtatcctcatctgccaggcgctccatttcctcaccggttcccactgccgccaccttttccccgtcaatgagcacatctgcccggacactgccgcttccgccaactacggttccgccttttaataccttcttcatatatatcactctcctgttctgtttctctctgtcaatctaacgatacgttccggctttcttccctttttcctgtcaccttgtggacatccggcacctgcatccatctgccgcctatgggcatctgtcacctgcgggcatcagccgccatggcctccagccgttccccgtcaatccggtacacggtccagtcactcatgggacgggcgcctattcccagataaaagtcaatgcttggcttattccagtccaggcaccaccactccaggcgtccgcacccccgttccacggcaatggctgccagccggttcaaaaaggcggtgccgaagccctggccccggtactccgggcgcacatacaagtcctccagatatatgccggcccttcccaggaaggtggagaaattatggaagaacagagcaaatcccactgtctccccgtccttcatccccagaatcacctctgccttttccttctcaaacagccactggttcagcagctcctctgtagccaccacctggtcaagcattccctcataatcagccagctcccttatgaacctgagaatcaagggtatgtcctgtggtttggcaaaccggaattcaacggccttatccgcccttttatgttccattccatgccctgtcttgtcaagggtgttgtccatgatgtcatctccttatgcggaacaagcgaaaagcaggtggactgcctttcgccgttcatttccaatgttatttttactttttctttgaatagtacgtgtcatccatgggaagcgttgtcctcagcacatggtcctttgcataataagctccctgtgccgccggagcggttggtatggtggcaatttccccaatcccctttgcgccgtaggcaaaggacagcagttcttccttctccacatagattgcatggatatccggaatctgggtggagcgcatgagtcccagggtgccgtatttagcctggggaacaccgttctttaaggggaagtcctcggtcagggcgtagcccagtcccatgagaacaccgccctcaatctgaccctgtatggaaataggatttactacctttccggagtcatgggcagcatacacttcctttacccgcccgtcgtcgtctaacaccaccacatgggttgcaaatccgtaagccacatggctctttggattgggcacatctgctcccagcttatctgtggggtcaaagaattccgcaaagaactcacggccttccagctggcttaagtctcctcccgcttcctgcaatgcctcattcaaatcagccgcagccatcctgacagcctcgcctgtaatcagggtctgacgggaaccggatgtggttcctgaatcaggcgccacctcggaattggcccccatattcctgaccatttcctttccaagccctgttgtctcggaaaccatctgtacgaatacggttgcgcacccctgcccgatatcggaagcagcgctgtacagctcaatctttccgtcgcggaccgccagctttgcccggcctttatcgggaagtcccacgcccacgcccgcgttcttcatggcacaggcgattccggccctgccgggattgctctcataggcatcctttacagccagaagagtttccttaagggctgtggagcagtccgcaatctgcccgtttggaagtaccttgcccggttcaatggcgttgcggtagcggatttcccacggggaaatccccaccttctccgccagcagattgatgttggactccagggcaaattcactctggcacacgccgaaaccgcggaacgcgcctgcgggcggattgttggtatagtagccgaagccgcggatatccgtgttctggtagcagtaaggccctacggagtgggtacacgccctctcaagcacaggtccgcacagggaagcataagctcctgtatcaaaataaatctcacaatccagtcctgtaaatataccgttctcgtcgcatcccaaggtaaatgtcccctccatggcatggcgctttggatggaagcttaaggattcctgtctggaaaacaccacctttaccggcctctgcaccttaagggctgccagagctgctatgtgctgtgcggatacgtcctccttgccgccgaagccgccgcctaccagcttgttttccacaaccacacggtccggatcccagcccagcatgatggatatttccttcctggtatcgtagacgccctggtctgtggaatataccttcacaccgtccttgtaaggaaaggccactgcgcattccggttccaggaaagcgtgctcggtaaagggcgtacggtacgtctgggtcaccacgtatctggaattttccagggccttctttgcatccccgcgggtaacgtggcggctctggcacagatttcccttctcatgtaccctgggcgcgtcctctgccatggcttcctgaatagagcacacgggtttcagctcctcataatcaatcttcaccatccgctttgccttctcaaggatgtccctggactcggcaaccaccagacagatggcatcgcccacacagcgggtgatatctccctttgcaatcattacgtcccagtcctgctggagatggcccaccttgttattggggacatcctcggccgtaagcacagccagcacgccgggaagggccgctgccttcccgcagtcaatatccagaacccgtgcccgcggatactgggagcggacagccgaagcatataccattccctccatctccacgtcatccgggtactcgccgtagcccagcaccttttccctcacatccaggcggaaggcacgctttccgacgccgtactcatcccccttttccagtgactcctcaatccgggcgtcgcccctcagaatggctgccgtcagctggatgccttcgataattttcttatatcctgtacagcggcagatatttccctttaacgcaaccttgatttcctcctcagtagggtccggaacgcggtcaatcagcgcctttccggccatcaccatgcccggcgtacagaatccgcactgcacggatcccattgccccgaaggcatacacaaaggcttccttttccgcgtcgcttaatccctccgtggtaatgatgtttttgcccactgcccgcctggtggtcaggacgcaggacttgaccgccttgccgtccaccacaatggtacatgtgccgcaggcgccttcgctgcacccgtccttgacagaatgaaggtgaaggtcgtccctcagatagcgcagcagcggtttatcctcgctggtgcagcgttccactccatttactgtaaaacaaaagttctctcccattttatgcctcctgcctctacgcctttaccgtgaaaatgccgtcggcatccagtataattcctcttggacatttgactgcacacataccgcaggcgatacactttgcttcatctattaccgcgtggttattctctatcctgacggcatccgccggacagttctttacacagataccgcaggcaatacagcccactgaacaatcctttcttgtctgggctcccccgtcctggttcatacatgccgtataaaccgggtattccggtgtggtaatgcgaatcagaccaaggggacaggctttcacgcacaggccgcagcccacgcatttgccccggtccacctccgctgctccaaagctgtttatgtggatggcatccgacttacaggcagccacgcagctgcccatgcccagacatccccatttacatttcaatatgccgtccggatgttctgccaagacctggcggcaatcccctgccaggtccccacggggaataaccgcctctgcgtgacagccccccaggcattgcaccacggctacttttctattgcgcttttgtgccattttgttcttctcctttcattattctcgcaaaagaataacgttacttttttaacaagcctttgccaaaggagtccccacattttcattgaggactcctttgtacggcaattcgcacacattgtaacagttcagaaatccgatgtgaactgtcaccacacattatctacagcatatatgaatagtcgttgatgactgtccggatgatattctggatgccgtccggcacatctgcgtttacggtaccaaccgtgtaatccatgatcctgccctgaagccttaccctgcacacaccggcagcagcgtccagtaccgtgaagccctggtttttgctgttttccatgtcagcctcgttggcaaacagggtgaatttgtcaagatagggagcgctgtcccacggacagaagctcttacagttgccgcactcgttgcacatataatccacgtggataatctgatgcttctccatgcccggaacaaccagagagatattggctctgttggggcatacctcaacacagttttcgcagtagctgttgcatgataagcagcgggcgctgtcaaccacatggtcattttcctctgccagcctgcccttgcgtccgtagatggtctctgcatcagagagcttgaacaagtcctctgccagggcttttccgataatggcctccgcagccatcttgccgtccctgattccttccaccaccgtggcaggaccgtacaggccgtctccggccacatagacacccttcacagaggtttccagcgtctcctggttcacctggggacgtcttctgctgtccagggcaatgccgaaactctcatagaatgcccccggaaccttctcgcctacagcggcaatcacggtgtcggcaggcacttccactgtctcatctgtctccaccacgccccggcgtccgctggcgtccatatctcccagcaccatcttcttacagtacagaactccattttccagcttaacaggagccaggagctcagcgaattccacgccgtcctccacagccatgaccagttcttcctcatcagcaggcatgtagcgtctggttcttctgtataccagagaaaccttctccacgcctgcgtttctcttggctgccctggccgtatccatggctgtgttgcctccgccgatcacaaccacgttcttacctaattccaccttgccctctgttgccttaaaccgtgccaggaaatccagtgcgttcatggtatcccctgcctccagcttaagaacgccctgctcggacgcgcccactgccaggacaacataatcataatccttcttaagggcctctatatcggtgatttccttaccgttcaccatctccacgcccatggctgccaccagcttcacgtcgttgtcaatggcactgtcgctgatacggaatcccggaatcacgttgcggacaacgccgcccatcttctcttccttctcaaacagggtaaccttcacgccgcccctggccaggaaataagctgccgccagtccggccgggccgccgcctaccacagctgccttcttatcagaggtaacctcaggcgctttgagcttagccataaccgcctcaaatccgccctctgcggcctccagcttggtcctgcggatatccaccggggactcgtagaagtttctggtacacttgctcatacagttgtgggcgcagatagtacctgtgataaagggcagaggattcttattgagaataacctccagagcctgctcaaactcacctgctcctgccagctgcaggtatctggtgatatcctgatggatggggcagccttcctgacagggggcgatgaaacagtcggtaagcggaaccggcctgttgattttcctggaaggaaggggctttaccgcctttacatggtgcttgtcggatttcacagcctccaccagtccggctaccctggcagcatccacgccctcaaaggcagcagcttccttggctgcaaataactgtccaatctgctccagtctctcataaccgcccggctttaacatggtggtggccatggttaccggccagatgcctgcatccacgatatccgcgatattaaagaagtcggcgccgccggaataggaaatgcgcagcttcccgccaaagtcctcagccagcttcccggcaacagacatggaaaggggataaagggactttccggacatatacatttcctcgctgggaagctcgttctgctttacgtcaacagggaacgtattggtaatcttcacgccgaattccagtcccttcccgtctgccagggcctggagcctctggagcatgggaaccgcgtctgagtactgtaaatcatctttaaaatggaaatcgccaaaggcaacatagtcatatcccatatcgtccatgatcttccttgcgtactcatatccaagcagggtggggttgcatttgatgaatgtatgtaccttcttctcctcaatcaggtatctggcgatgcgctcaatctcctggggaggacatccgtgaagggtggaaagggttgcgcagttgcatacctttggagatatggcttccacatcctccctggacaccttctcaaaccggtccagattgtcaaggagccactgcctgcactctttgaaaatggcggtctcggaagcatccttcatgccctcaatgaaacggtcaattttctctgtcttgatgccgtccaggtcatatcccacggacatgttgaactggaagccctcaggactgcccagtccaaattccctggccagcaccttgcaggcaaaccaggcctttacatactcgtcaaatgcctggggcacatagagctctgtggaccactcgcagttatagcactcgtcgtcagccttgatacacggcttggatacgggaaggtcctcgccgtccagcttctgtacggtcttaagctcgaagaaacggctgcctgccacgtaggaagccacgatattctgggtcagctgggtatggggtcctgctgcgggtccgaagggagtctccagcttacggccaaaaatctcataggttttgtccgggtctgcaatgaatggtctcttgatgccaaatacagcgcccttcttgttctcttcaaggatccagttcatcagttttccaaatggaatcggggtcataatgtcgctcatattattcttatcctcctttataaccagaccaggtcccagcaccggataccggggacattgtccccgggtcctccatccggctcagccgcccggaagacattgtcgtcccggggtgctgctttcccgccgccctgcaatcggatatcacttataaattatacattgcgtatgcgttgtttatatataggaaagaccagccatccctggaaggcgtttcctatggatgccggctgctgccccggcaattaaccgttgatggaatgggccagcttctttgcctcttcccttacctcataaaggatcttctcctcatccagtcccacaagctccctgttcttcatcagaaccttgccgttgcataccgtggtcaccacgcttcttcccgtcatgccgaacaggatgtgtccgtttacattggacgcgtccattggagtcagcgggatatagtcagtgacaatcacgtcagcggcagcgccttccttcagtacgcccagctgcttcttgaaatagcggttggcaatctttgcattaccctcaaagagcatctggggtacctcgccccaggccgcattggcgtcgcagaggtgatgtttgtgaagaacattggctaccttgaaggattctgtcatatcatgggtgtaaccgtcggttcccagaccggtgagaatgcctctgtgcacgatctccatggtaggcgggcatccgcaggcattgcccatgttggactcagggttatgtaccaccatggtatccgtatccttgatcagctgcatctcatgaggatttacgtaaatgcagtgggccagcagggtcttttccccaaggatattgcagtccatcagacggtccacaattctctttccgtacttcttaagacagtcgtggagatcctcgatgccctctgccacatggatgtggtatcctacctcagccggcttgttggctgccgccagctccatggtctcatctgagatggtgaactgggcgtgcattcccatcatacccgcaatcatgtccgtgtcatccgccagggcgtgtttgatccaggacacgttttccataacagccgcccttgccttatccatgccgtccctgtcggaaatttcatagcacagacaggtcctgacgcccatctccttagcggcgtcctcaatggcaaacagggaatcctttatctccccgaagctggcatggtggtcaaatacggtggtgactccgttcttaatggaatccagataagtggccctggcgctctggcgggtctgttcattggtcaggtggcggtcaatggtccaccacatgccgtccagaatatccagaaaacccttggggtcatatcctttaatggaaagacctcttgccatggcactgtagatatgctcatgggtgttgatgaaggccggcatgatgacgcccccctttgcgtccacatattcggcatcagggaactccttcttaatctcctccagtgtgcccaccttctttactgcggtaccgtccattgccactgccccattttcaaaaaatggctgttctgggtctctggtaaccagacgaccgttcccaatcactaacataacctctctcctttgctttttattattttatgtacctgctctttaaatctgtcctaaacaccatcgggatttcataaactttaataagatagaacaggacttcctgtacccctatactaacaccatacaaatccatttgcaagcagaaaatgcaaaaatttttagatattcaaaatttttttgtaaaaacctcttgcaattccttttttttgtgctatgatggaatcataaacaacgcatcacaactttgcgaaatgtttattgtacaaagtcaccagatttgaagagtccgaggaaaaggaggttaagccatgtcatacacactagatttactgaaacagcttgctgatggccttgcgagacagttcggacctgactgtgaaattgtcatacacgaccttgaaaagcacgacctggaacattccatcgtgcacatcaacaacggtcatgtgacaaaccgccaggagggggacggaccttcaaaagtagtcctggaaacccttcacaaggatccggcttctttaaaagaccatcttggatacctgacccgtacatccaacggcaagatactgaagtccagcaccatctacatccgtaatgaggaaggagattccattgactatcttctctccattaattacgacataacaggcctgatgactgtggaccgttccattaaagctctcatcgacaccgaaccccaagcggacgtgaagcagcagcccgaacagattgtccacaacgtcaatgacctgttagataccctgattgaacagtcggtagcccttatcggcaagccggccgccttgatgaacaaggaggagaaagtcactgccatccagttcctgaacgatgcaggcgccttccttataacaaaatcaggggacaaggtttccaagtacttcggaatctccaaatttactttgtacagctacattgatgtaaacagccgcaagtcggaagataaaaaagcgtgatgataattaaggaggattatgtaacatggatcagaagattctatgggcggtcaatcaaatgcctaagacagatgacaagaacctgccgattatgggactggaggagattgcaaaggcgaggacattccacgaaagcttcccccagtacaccaaaacaccactcaccaagctggaccacatggcagcttatctgggagtaaaggaaatctacttaaaagatgagtcctaccgttttggcctcaatgcattcaaggttctgggaggttccttctccatggcccgctacattgccaaggaaaccggcagggacgtatccgaacttccctactcagtcctcacttctgaccagttaagagaagaatttggccaggctaccttcttcaccgccacagacggcaaccacggacgcggcgttgcatgggccgccaaccgtcttggacagaaggcagtggtacatatgcctaagggttccacccagacacgtctggagaacattgccaaggaaggcgctgccgtagacatccaggagatgaattacgatgactgcgtacgtcttgcggccaaggaagccgacgaaaccccaagaggcgtcatggtacaggataccgcctgggacggatacgaggagattccatcctggattatgcagggttacggaaccatggccatggaggccggcgagcagttaaaggaatacggctgcgagcgcccgacccacatctttgtccaggcaggcgttggttcgctggcaggcgctgtggtaggctacttctccaatctgtatgctgataatcctcctgttttcgtagttgtggaagctgaggcagccgcctgcctgtacaagggcgctgctgccggcgacggacaaatccgtatcgtggacggcgacatggaaaccatcatggccggccttgcctgcggcgagcccaacaccatttcatgggatatcttaaagaaccatgtcaaagtattcatcgctgcccctgactgggtagccgcaaccggtatgcgtatgctgggcgctcctatcaagggcgacgcgcctgttacctccggagaatccggcgcagctccattcggcgcactggcagccgttatgtccatggatgaatacgctgacctgagaaaagacattggcctggatgagaattccagagtactgctcttctccactgaaggcgacactgaccctgaccgttacaagaacattgtatggaaaggtctggataaataacaatcacctatatcacacccaaaacaaatatcaatgtataatggaggaaatgaagaaatgaatctggattacgcaaaaatcaaagaagcagcaaagaactatgaaaaagacatgaccaagttcttacgcgacatcgttaaattcccgggcgagagctgtgatgagaaggctcacatcgaccgtatcgctgaagagatgacaaagctgggatttgacaaggtagacatcgaccccatgggcaatgttctgggatatatgggaaccggcgagaccctcatcggctttgacgcacacatcgacacagtgggcatcggcaacaagaacaactggaacttcgatccttatgagggctatgagaatgacaccgagattggcggacgcggcgtgtccgaccagtgtggcggtatcgtatctgctgtatacggcgctaaaatcatgaaggatttaggaatgttaagcgacaaatatacggttctggtaaccggtacggttcaggaagaggactgcgacggtctgtgctggcagtacatcatcaacgaagacaaggttcgtcctgatttcgtagtatccacagagcccaccgacggcggcatctaccgcggccagagaggccgtatggaaatccgcgttgacgttaagggcgtttcctgccatggttccgctcctgagcgcggcgacaacgctatctataagatggctgacatccttcaggatgtacgtgctctgaatgaaaacgacgctgctgacgacaaggaagttaagggccttgtgaagatgctggatgagaagtacaatcctgagtataaggaagccaacttcttaggccgcggcactgttactgtttccgagattttcttcacatctccaagccgctgcgcagttgctgattcctgttccgtatcccttgaccgccgtatgacggcaggcgagacatgggagagctgcttagacgagattcgtgctcttcctgcagttaaaaagtacggcgatgatgttaccgtatccatgtatgagtattcccgtccttcctataagggccttacatatccaatcgagtgctacttcccaacctgggttatcccggaggaccacaaggttaccaagtccctggaagaagcttataagaatctgttcggcgacgagcgtatcggtgtggacgcaacagcagagatgagaaaagcacgtcctcttaccgataagtggaccttctccaccaacggcgtatccatcatgggacgcaacggcattccttgtatcggttttggtcctggcgctgaggctcaggcccatgctcccaatgagattacatggaagcaggatctggttacctgcgcagctgtttacgctgctctgcccagtgtttactgcaagtaattaactaccttcgtttattgtccgcagggtgttgtcccggctgctgttaaaccgcggtcttggtccgctggccccagagccgttcttctggcctgaggggcagccgggaagcatagggcatacgccctacacactgctcattcgtttaccgttttccatgaagtcctaagtgacctgtttgtttcgacggtctatgctgaaggccgccggaacggctcaggcccgcttacattcatgaaagaacggatatcccttttatttttgtaacatccaacaacgatacccaaattaaaaattaatataataaaggagtcaatcaaatgaaaacattacaggattacattgataagttaaacagcctcaactttaaggaaatgtacgagaacgatttcttcctgacctgggagaaaactgacgaggaactggaagcagtatggaccgttgctgacgctctccgcttcatgagagagaacaacatttccacaaaggtatttgagagcggcctcggcatctccttattccgcgacaattccacccgtacacgtttctcctttgcttctgcctgcaacctgttaggtctggaagttcaggatttggacgaaggcaagagccaggttgctcacggcgagacagttcgtgagacagctaacatgatttccttcatggctgacgttatcggtatccgcgatgacatgtacatcggcaagggcaacgcttacatgcacgaagttgttgacgctgttacacagggccacaaagacggcatcctggagcagaagccaaccctggttaacttacagtgcgacattgaccacccgacacagtgtatggctgatatgctgcacatcatccatgagttcggcggcgtagagaacttaaagggcaagaagttagccatgacatgggcttactctccttcctacggcaagcctctctccgttcctcagggcgttgttggcctgatgacacgtatgggtatggaagttgttctggctcatccggaaggctacgaaatcatgcctgaggttgaggaagttgccagaaagaacgctgaaaagaccggcggttccttccgtgtatcccatgacatggctgacgcattcaaggatgctgacatcgtatatccaaagagctgggctccatttgcagctatggaaaagagaaccaacctgtacgcagaaggcgattccgagggcatcaagactctggagaaagaactgctggctcagaacgcagagcacaaagactggtgctgtactgaggaactgatgaagaccaccaaagacggcaaagctctgtacctgcactgcttaccagctgacatcaacgatgtaagctgcaaggacggcgaggttgaggcaactgtatttgaccgctaccgtgatcctctgtacaaagaagcaagctacaagccatacgtaatcgctgccatgattatgctggctaagttcgctgacccggctgaggttttaaagaagctggaagaaaaaggaactcctagagtattcaaataaatcattcatcttaccaagcaatacaatgtaagggctgccggactgagtcctgcagccctttttgtctcaaattatgcaaaaactcggcgggataccctcatatcccgccctataaaggggaaaatcactatggaaaacaagaaaaaacgtattgtcatcgctctgggcggcaatgcactgggcaatacccttcctgagcagatgaaagctgtcaagatcacagccaaagccatcgtagatctcatcgaggaaggctgcgaggttatcgtagcccatggcaacggccctcaggtaggtatgatcaacaatgcaatggctgcgctgagccgcgaagacgcaaaacagcccaacacccctctctccgtctgtgtggccatgagccaggcttatatcggctacgacctgcagaacgccttaagagaggaactctataaccgtgaaatgtatgatattccggttgcaaccatgattacacaggtccgtgtcgatgcagacgatcctgcctttgaagctccttccaagccaatcggccacttcatgaccgaagaacaggctaagattgcagaagaaaagtacggatacatcatgaaggaggattccggacgtggctaccgccgcgtggtggcatctccaaagcctgctgaaatcgttgaaatcggcgccatccgctctctggtagactcaggccagctggtaatcgcctgcggcggcggcggtatcccggttacccgtcagggaaaccacttaaagggtgcaagcgctgtaatcgacaaggacttcgcaagtgaactgttagcagagaatctgaacgctgatttcctgattattctcactgcagttgaaaaggttgctgttaacttcggaaagccggaagaaaagtggctggatgacctggacacagaagaagcaagacagtttatcaaagagggacattttgcccccggttccatgcttcccaaagttcaggctgctgttaaatttgctgaatcaaaaccaggacgcactgccctcattacgctgttggaaaaagcaaaagacggtatccagggaaaaaccggtactcatatccatttagcgtaaaggaggcaattaaaaaatgaatacagacaatacagcgaaacagcacgcatccctgtttgatttggatggtgtgccaaaaatgagccaggcaattcccctggcccttcagcatgtagtagccatgattgtaggctgtgtgacgccggccattattatttccggcgcagcaggcattgacacggcagaccgggttttgctgattcaggcttccctggttgtatctgccctggccaccctgctgcagctcttccccataggcaataagaacagtttccatctgggtgccggccttcctgttatcctgggcgtaagctttgcctacgttcccagcatgcaggccatcgcggaacagtccggcattcccgccatactgggagcccagattgtaggcggcgtgtgcgccattatcgtaggccttaccatcaagaagatacgaaagttcttcccgcctctgattgcaggcacggttgtgtttaccattggtctgtctctctacccaactgccatcaactacatggcaggcgacgcgggtcagcccacctacggtgcatggcagaactgggtggtagccatcttcactctggtggttgtcactgtgctgaaccattttgccaagggattcctgaaactggcatccattcttatgggtatgattgcaggctatatcttctccatgttctttggcatggtaagctttggaaatgtggctgaatccggcatgttccagcttcctcaggtcatgcatttcggcatcagctttgaggcatctgcctgtgtggccctgggactgctgttcgttatcaactccgtgcaggcaatcggcgacttctctgccaccacggcaggaggcctggaccgcgagcccaccacaaacgaacttcacggcgctattctgggctacggcttttcaaacatcataggagccttcctgggatgtctgcccaccgccacctacagccagaacgtaggtatcgtggctaccaccaaggttgttaaccgcgtgacattagggctttccgcgctgattatactggttgccggactgtttcccaaattctccgcccttctgaccaccattccctatgcggtcttaggcggtgcgactgtatctgtattcgcttccattgccatgaccggtatgaaactggtcatgacggaagatatgaactaccgcaacacctctatcgtaggtcttgcagctgccctgggaatgggcgtgtcacaggcatccgcctccctgtccgcattcccgacatgggttaccacaatcttcggaaaatccccggttgtcatcgcaaccctggtggctatcctgctgaatgtcacccttccgaaggataccggaaaagttaaaaagaattaatcctattattgtaatggtataactgaaaaacggactgtccctgagcatatcgctcccgggcagtccgtttttcagttatgctttggataaaccatacggcttaacaaccttcaaaagaaccatcctgattatccgtcagcagatgttcaaaatcctcctggggcatgggctttgcaaaaacatatccctggattacattacagcctgcttttcttaaaaattccacggtgtccatatcctccacgccctcggcaatggtctttatatccagctccttggccatattaatgacgttggacacaacaatgcgctcgcgcctgatgtcccggctcttctggaagaacaggatatccagtttcagcacatcaatgggcaggttctttaacaggttaagggaactgtaacccgagccaaaatcatccagggaacagataaacccacgcgcattgagattgaccaccagctccgcaaataactccgtgtcagcagccagtatgctttccgtaaactccagctccataacgcggtccggtatggaatatttagccttgatatccgtatagtaatctacaaaatcattctggaacaggcctgccttggaaacattgaccgccaggctcaccggcctcccgccctgttccaggtgactcctgtaccaacggcatgcatgctcaaacatatagcggtccaatttcacaatcagctcgcttttctcaaataatgggatgaaattccccggcagtatcagcccccttcttggactgagccaccgggccagcacctctgccccggtaatctggttaccgttctgaatatctatcttgggctgcatatagagcttaaactcctcctcttccatggctgcctctgcctcagactccaggacggtatcctccagcatgcgcctgcggaggctgtcgtcatagaacacataggagcttcccggtctttcctttgcaatcttatgggccatgttggcataattcaccagcacatccagagactgcttcccgtcaccggcccggaaccggtagacgcctacaggaatctccatgaatggctgttcatccatgcccgaattcctcatatactccttaagctggcacagaccgctgtccagcacctgtgtgtcctcacaccgggttataccggcaaaattgtcagccgctatgcggcagctgatacagccaggtccttccactgtcctcagaaactctgccaccagcctgagaagcctgtcgccttcctcgtaccccagaacatcattaatcagcttaaaattccttaaatcaccataccagagcacataggaggtaagctcagaacgggagatctcaggacggttaagaaatatctccacttcacgtttaaagcccgcaaaattacgcaggcctgtaagagaatcactataagccagttccatcagcatcttctgattattcacagccatcttccgctgtctgctcatcagccatataaacaggctgcaggcaaccacaatgataatcatgatcccccatgctgtctggatgtagctggaacgcagcacatccacaggaaccatactcgcctgataccattgaccctcgatgatgggaaggataaccagcatctgcctgactccctgcctgtccgtaagtatgaaatcccccctgccggtgtctcttatgacctctgcaatcttctccttgttatcaggaagaatgtcaccctcaaatgtcttgatggtcttaagcacataattgccgtttgcatccagaatattggagtaaccggctcctttaagaaccggtgcgtcaatgatttccctcagtacgacagccgagtgaaccgcacagagaacgcccctggcattgccgctttcgtcattgattctgacgccaaaatagtttatatatccgctggcatcctgttggtctgcaaatgtgttggatatgcttttttcaccctgtaaagcccgttcaaaaaagtccatccctttcagattaacctcttccacattgccttccatatccaccatacgggcattaccgttaatatccgcgtaacccatacggataaaggcattttcctcatttatatcattcaatatggtcaggatctggttctcatccagaataaccagctctctgaggctaacagccagcccctccagcgtctgccagtctccctcaatctgtttcaaaatggatgtccttgtctgattcgcagcatcatacaggtatgccacgttctctttctggcttttcaaaatcatttgtacaagaaaaataatactgctgccaataaaacataagcatagtatgataggaagcagcgtgtccctgcggctttttcctctgccatctgcagttgtcatctcatagtacccctgtcttctttagactctaaaataataataatatatttatacttaaatatcaatgacaaatatccccggaaacagtaccatatgctgttatttgatactgtttccggggtatacacacggcgttattcacttgttttccattgggtaagtttcatttaatctaatcattcagctcataggaaaccgttacctgggcttccacactgacctgtccgggcataacagaagcagccgcatcttccgcaaccgcagccgccatcttggcagaaccgcctgcattataggaagcatatctggtctccggctgatagccgaattcctccacatggaccacaccggccagtgtcttattgctggcctccgccagagcctgggcttttgcctgggccactgccatggctcccttcagcgcctcctgatagctggcatcatagctgctggaaaaatagctgacggaattaataccgttgactcctgcagccactgactttgtgatgatggttcccgcattgtcaatcggtatgtcagagaccgtcaaactggtagtcatctcatatccggttatctcctgtttatctgaattccagttgcggataggactcaggccataagaagatgtctgtatggaagtttcctccactcccaggccctttaatgtctcaattgcagcgttcaggtcattggcattcttctcctggcaggcagcagccgtatcctctctggtatagacggcatattcaatctgcgccatatccggcacaacctttacctcctcgcgcccggtcaccgtaattacattctctgccgctcctacattctgtaccttcagcgtgtccggcatctgtgccccggccccgcatccgcccagccccaaggctgcagcggccactgccgcgctgatgcctgctgtgtatactgtcttcttcataatatgtttcataattgcctccctcttttttgttttatcggaatctaatcatatgataccgggcacacgaatatgccctatccctatactaccagaaagagggaattctggtatttcttttctcttaattatagaggtatgtttcattacaaagtttatacgaatttatttccggcaatgcctggagcttcttcatatcttcagttccataacttgggctccatatctttgctccatatcttcggctccatatcttgcctgctgatatttcaccgcggcccttgacagcggcaccggaaactgctaatatagagtgagcgcaggatttcgttagcataccaggtaagcgcagcactgaatattcaggggttgtactggtttcgacgggggtcatgcagctggtgaagctatccccatgcgatgggttaaatggcaaaaataaatataaacgctaacgacgaattagcaatcgctgcctaatggcagctgtcagacttagagcacccgcactttaagaccctggcatcgactatgtgggaaacgacgtatgcaaagctttgagcatatgggcgtatgatgaagctactgaaaccatccgggtgtcctttctctgatggcagagggaatgtcaaataaaggactatgatagtagaagaacagggaattgattttcggacaggggttcgattcccctcagctccactctggataatgtcggtttttccttattttataagggattccggcattttctttttagaaatgcttgattaccttttcaggctgttttcattggaattgcagcccgatttatctgctgtgttttggtattattattcttattactgtagaaatccaactactttaggaatttcttcttccgagaatacttgttcttctttgctgataatctttttagaaaatatgtttttggacaattcaaggcattttaaaaagctaacaatatctatttaagtcaatttctttttttagcccgtttaaatatgccatgtaaaagaagctatatagtgaaaaacaactatattataggatatcttgtaataggtagaaaattattcgattattttagtgatttacaaaaatactttatattcaaatcattgccgaacttctttttcattaaaatagccgtaccaatgctgatacggctccacaaaatactagtgacttattttcattattcatttattcctctgcacttttatcaatccagttttccccatcatagttcaaaatctgttctgataatttttttatatatggttgtgctttctcttcttgcgcataccataccaatgattgaccaaacccatacgtacgttttcttgaaacaggcgcatcccatatgtgattatgtcgtttcccttctggcagtaaaacgcaatcttcttttttagccaaaatattataatcttgtatatctccattgtcaagttccactgactgataattacgaaaaactgttgcattctggtaccatcctacgattgatgtttcattcaacattgtagtagcgcaccatattaccaatacatcatcaacttcttggtcatctttaagcaaatcacaaccttgaatattttcgatatgtagttcattgtgtttccctttgctggatgattttgtttcgacgaaccctaaacaatatgcttgtccatcttctgaaataactggagcaaaattatactgctcatttccttccccatgctccttaacaaagcttcccccattaaaagcctcatctttaccagggattacacctttataaaacttcatggcagaaattttacaaaatagaattctcatatgcatttctcctaattatttcgcagcttccacacaactgtcactgtatcgctggccctaatatcttcaggttctaactgcaagggttcatctgacatatagcaagtatcttcttccaaacttaatggcatagcatccttaatctcccatatggtgaagtagtaagctttaactctccccatgaataatctatagacacaagctcatccagtttcatttcagctgctttagcaagaacctctgctttcactcttgaatcctttacagccttttcaagtaatttatttttcaatacatgactatacttatatcctttaaagactcgtttgtattcgtcctttttaattttttcagtttcaaagactgaatcaatctcaaagttagttgtctttaatggcttctcgatatgtatccttacgttcctctaactcaaacagcaagcatattctatctggaggtactgatatctgccctttacctgtaacacgtataattttcttcattgattgcttccctaacaattctattattattgattaattggccgaaaaacgtcttatatcttctcaatgggattcaactatattctttttgtaaacgtgggcaccaaaaagcgtcaagcgagaatacagtattatgctgatatttctttatatcgcctaaaagcggttaacaaacttgtatattcatcctctgcccactcataaaaaggcacattatcagtgccttgtaattctaaaagccaatgaatagccggtatgcaccaaaaaatcctgccaacaagcatttcttcttctgttaattctgccaaacctgccgaatttttataattatctataataacagaaatatcagcatcaacttgttcagcttgacgaagcaatacatataaatcagaataaaaaggtgaaaattgtgccgttgcccaatcaataatacgaatatcacccttcgaataaatcatatttttaaaatgcatatcataatggttcagaaatattgggtatttgctatatttttcataactatcactggtaaagcttactaagccacttatatcaaacgcttttgaaatttcataaagatgattaagtgttttttcttttgataaataatacttttggaatgttgtctcgttaacacaactaatgttatttcgtgatgttctatataaatccccgatttttaaagctgctttatataaatgaatagcttgtggagcatcactacacgttaatccgtcaatatattcaagaacaaacttgctttcaccctgttttcttttacttgcaacaacatgtacatgttccacttttaagggagttaaaatattttcatatatctcaagctcatctgagccataaggcactatagaactttggccactatcattaacttgattttctattttttcaatataagttaccccattattttcagttaacatgcttgtttgtgaacttacccatttttttaatatctttctgttaaaatttttatcaaagaatatatcattcatattttttattcctacttctcccaaatttcccttgaaaagattgtaccataactcctgcttgttttccacttcattcgaggtatatctatggatatccattttgaaaaactaatagtgttcccaattatcttgcattactgatgataacgttaataaccataccagcagaggagagaaaaaggccagggatatgtccccagccgtataaccttcttttaatttcccaaatcatccaaacgactcctgattactgattatatcaatgtaatagccaatatcatctgacttattcctataaagcttcatgtaaaaagtccctgtacgcaatatcttatttgtaacaacattagttttttcgtatttcaatttcatatacaaaaaagttccatcagaactctgttcacagtcagtaattttatacttgttttctttttcaaaaggtattccttttaattcgccctgctctgattgtggtatgttttcaggattcagacctatattaaacactgcgtaaaagtcgtcaagcgtcttgtctcggtcaaaataccctattccatcttctatacgcaatggaacaaacattgtagttatatcaggattatttaaatgtttctctgtatccgcagccagaagggaattcattaatttctgcctgtcctcatacattaaataccggagctgtccatatgtaaaagacggaacataaaattgatcttcgtataggttcaaaaggccttcggcagcatctttgaaaatctcttcctgatatgaattcaacgaatacatgtgtcgtacaaatcccagcttccacgcaccgtttttatcaactgtatagccgtccggcgtaactgtatcactcagcatacgtcctgtatcatcaaaataatagcactcggcaattccatcgtcattaccatcaatccacatccatgtggatatgggaaatgttccgtctccattatcataccaccatgcggatacatccccgtcaattccttgtttccaagttcctgcatatgcttcccatattaaggtgcccgaaaaaagcatcgaaagtgtaatcatagcgatccatttttttactgtcatcctttattttcctttctccatatagcggtaactcaaaattatatatatgaattataacatatctacaaaataaaaagaactgccttccaaccagaaaacagctagaaaacagtccctctcaaccaatttatcattttacaagtcattccacaaataataagctactcaactaatccctttgcgcataacaccccatagtcaaacattttcatgcacaaatattctgtaattaattcatagctatttatgataacctctatgtccttatcttcttctccgtccgcccccaacctttggcataggcgctgataagcactcattatctctgtatatgcctgttcacacacttttccctctgagaattcattgagaattcatcctccacatacttacaatcttcaggcggattatctttaaagtctaacctcccattcatcaaatcataaattagttttttgcactcctccatagttcccccatttatattttaaataatatcactataagcataattttaccccgtttctcccataactatattacgccgtcattatgccgtcaatcaatatttagccgtcattttgactttataatgaggccatatgacttatatggaggtaacacgcatgactaacgaaatagcaaaattcaccttacgcactgattccgaattaatgaaaaaattacggattgtagctgattataatggtcgttctgccaatcgtgagttggaagtgcttataaaaaaccatgttgctgaatttgagaagaagcatggaacaatagacctaaactaatgccccagacataaaagaaggaaccgaattcccatgttgggaacctgttccttctatatgtgtccgtattaatatgtggctctttcaaaaacacaaggttgactcccttggtaaataattcctcatatagagaaaaaccttcctctgcattcctggacattctggaaaatgaatcaaatataatcgtatctcctgtttgaattttgagagtatcttatccagtccttttctacccccagattttgttcctgtaaaaatctctttcacaatgatggcaaaggaataaacagccagtatattcctaacctgtctttctacattctgttcccctgttgatattctaccatacccatattctttgttcatgtaatcatcccttttagtattacttttcacggtcattattactgttactataattattataccataccagaagggcatttcctttaatttgtcaacaggtccataatatctgtttctctctcagctatttaacacttgaacaaacgctccatccgaaattgtatagatattatagataacactatcccatgttggccaaagctccggagtggtttcgatcacttcaggaatgagttcaccaacaccgttctcatctatatcttgtttgcaatacaatcttttacagagcctatgaaatcctcatcatctgcacaccaccacgaaacaatatactccccccacagcattctgcccaaccccggaatgtattgtccgtgagcaaatgtaaaacatgattatcccccagaaaagtacacaaaataagctttcaactccaacaaagtttgtgcacactttttcgacaacaggtgatactataatagacgtaacccccccaatacattatatagtttttgctacaccccataaaaaacgaaataccttctcctaaaatggccagttccccgactggccattttactttgtattttacattgtccaccgggcatactctaataaggcgtttcatcatccagcagctgaatccggagcacatcactgacctgagccggagatatctccaaaacttctccgatataagtgactgatacggtattccctaccctcaaatccttcaccgttatgggaacgcctctccatataagctctgttttatctcccactgccagttcaaaggtcccgcgtccattgatatcatttatctccaatccctgaaccagaaggcggttttcccttatctcttcgatgacagcataaaatgtggttccaaccattggttggacgctccttcttcccccatagtagccgccggccgcggctaacagaacagccagtataatgcttacagtatgtacaatccgtttcatattccactccctttgcttcattcttattcatagaataacattacaggaagatttttttaataaataaactattaattattcttacgtattggcaaatactaaagactttataagacgttaatgctaaactggtaaataacatttatccgattcaaatatgatttattataaaggagacttccatgaacacatcagcaaaaagcgaacataccggaaactccggctttaaaaaggaggttctggagtgggtcaaaattctgttggccgctgctgccattgcctttgtcctcaatacctttgtcatcgccaacagctacattccttccggttccatggagaataccattatgacaggtgaccggatcatcggctccaggctttcatacgcctttggagcacagcctcagaggggggatatcgtactctttgaccacaaagcggagccgggcaaggacaagacccggctggtaaagcgaatcataggacttccaggggaaaccgtggatatccgtgataaccaaatatacatcaatcagtcggacactcccctggatgagccatatcttccggaacccatggactcagagaactatcatttccaggttccggaaggctgctatctcatgctgggtgacaacaggaatcattccagggatgcccgggactggtcagacccctttgttccggaggaagccataactgccaaggcattattccgctattttccaggaatacactggatttcctaacccttattactgatacagacaatgaaaaatacgttactgataaatattattaacctgccaggctcctccaaactgatacatggacaggccggaatcccctcccagctgcgctccggcatttccaactgcctgcagcccggatgcgtccgtggcagtaaccaaattacagagacggtccgtaaacagcctgccgccgcatttggaaatgaagctggcggcatcactatattccgctgatgtcccatcctcgtaaattacattcaccggataactgcaaatcctggaaagagtttcaatatctctgtacgaaaagcatttttgaactgtagtggctgcttcttccaggtttccaattttgagggcccctgaatcactgccagcctggctgttgtaatcactatatatgttgttgatcttccattttcctccaaatttaaacaggctcagacctgcatcgccgcccatctgtactcctgcattccccacttcctttaactttgaaacatctgtggatgcgatggcagacttcattccctctgtgaaaacgggaccggtccccagcgccagcagctctgacttgcttttaagttcagtcaattcgccggatgcatatgatatgataagaggaaagctgcataaatccgccaatgcattcaggtcttgtttcttaaatgcggattttatcctggaagccgcgtccttgatttttttctgtccctcccgtctctgctttgcggaataagcagccgcgggttttttggatgcagcatacacaggcattgcgggaactgcgtttgcaagagccagtgtacagatggtaatgacagctaaatgttttttcatggtaaatctccttttcgtcttaattattttaagttccatacgggttcatacaattagacgggagagctttcataaaagttgcacatagtaaaaataagtttcagataaacaggtgaggtgtattcatggaaagagaaaagggcattgcatactgcgggcttgcctgctgtgtgtgcagcgaaaatgttctttgtcctggctgccgcagcggcggctgcccgggcagagaaacctgcaaaccgtttaactgctgcataaaaaacagatgggagggatgctgggaatgtcctcagttcccctgcggtgctgccatcttgcaaaaaaccaggattcaggtatttgcagattttgctaaggaatatggcatggactccctgatagacgcactggagaaaaaccaatgccgtggtgttgtatatcattatcccaatttgctgatgggggattatgatagtttgagcagccaacaggaaattctgcatctcctgctgaatggaccgcaagaccgtataaaaggcggcatttttatgcaatcattcataccgtggcttgaccgtataatggccggccccctgccggaggaaatcattgccgtcaactttaatctctatgatgatggagacagctgctggtccatggagttcactggaacccgcagcttcgacgcgtatgacccggactgggcctgtgacgaagtatttacttcccgtgacagcactctccactgggtacaaaataccggctggcagcaggtgctggaggatacggtacatacaatacgtgcttatctggcaaatggaacatactccggcaggttaaaggcgtatcagggaatcggtgcagggtttgttgatggggatatcgtcattctgtatgaaactcccaaagaatagcaaagaacaggctggcaatacgcgtatataaaacaaacagcatttcgtgccgtatcggccaaaatgctgtttgtctatgtttgtctatgcccggctatgtctgtttacgcccggttatgtctgtttactcccggttatgtctgtttactcccggttatgtctgtttacgtccggttatgttcgtttattcccggttatgtccgttcgtattatgctgcgccagacagctctgcacaccttttggatagaagttccggcaggttcccggcagagtcagattaaggttctgccttccacaaaccatgcaggttgcaatatgcgtatacagcctctgcctcatctccttcacagagcataaactctgcctgcggcttctgtcccggctgcagctcttttctctgatttccctgtctggtagccagagcaatccactggatatagtgttccggaatcatggggtgctcggctgagcctactgtgacagtgaccttagacccatctatctgaatgacaggcacatgcttttcaactgctgcatctgtggtgtttggaaccagttcctgcatcttttccccacaacagacaaccgggacaccgctgctcttcacataggcaattatattgccgcagtgattacaaatataaaatttcatgttgtacctcctttttttatgtatggtctgaatccagtctatcacaattctgtcttattgcaagacaatggaggaaaattaacaatagcataacagctataacggccgtaatcaggccctaatcagcatgatgctcagcccggcctgtctattcacaaacttctcacattctgttcataaatccgttacagaatcataaaattctcctcacattttatggatatactaatttatgtaaagagctaatgctaattaaactttttttcataatactcggccggagggatgaaatccttccggcctcctcctttttattcaactttctggattctttttactatcccggcatatgataattaaaaaaggatatttttttatgaaatatgaaaatctgactcccgtagttggggtcattaccaacatttccacacaggaaggggattgctgtacccaggttataaccctcagtgttgagggacagcccgtcaacatgattctatccgatgacacctttgtggtggacaccatgcgcctgatgccaggtatgcgtgtggctgcgttttatgacaacaccctgccggtccccctcatctatccgcctcaataccaggctgatttaatcgctgtagtcaggccggaggaggatgtaaacctttcctggtttgatgaaaccctcactgcctctgatcaatcgctgaagctgaacctgtatcagtccacagttttgtcaaccttaaacggccagccatatttctgtttcccggcaaatcatttcctgctggtatattatgcggctgccacaaagagtataccgccacagacagctcctaaccgggtcatagtgctgtgttcatagacctgtaaggaattattttttttcattttcacaagaccgttgtaagaatgcataaaatagtttttttcattctgcaaactttgtgcacactttttggatagcgtatgctattataattaacgtaaacccccccaatacattatatagtttttgttacaccccataagaaacgaaataccttctcctaaaatgaccagttccccgactggtcattttactttgctgttttattggttccatatttttgcaaatatcgggaaaatattttttctgtttttttattaaaagtactggacaaactgaattttatatgatattatatataagctgtcgctgagatgcacagataaggcctgatggtcaagcggctaagacgacgccctctcacggcgtaaacccgggttcgattcccggtcaggtcatgaaaacaagcagacaaaactgcttgttttttattttttcggactccaaactattgtaaaattaagtaaatacattttcaaattacatttttttcaaaaaatactggacaaacaaaaaactttatggtattataaacaagctgtcgctgagatatacagacaaggcctgatggtcaagcggctaagacgacgccctctcacggcgtaaacccgggttcgattcccggtcaggtcatgaaaaaagcaagcagatgaaactgcttgcttttttgttgttctattcttcaccgtttcttgcgcattattttatttcggttctatactgaatgttggggtgtgctgaaaagcacacttccaacattcttttcgttgtaataaaatacatctataagaagcctcctaaacgcattatcccgaccaaagtttaatgttacggaggtgaccccttatagatgtaccctaattataccaaggccttccttaacttggaaggtgtttttattaaaaaagtggttcaggcagactctttcattaaaattttcatccagtcccaaccggtagaacagacttgtccctgctgtggggctaaaacaaaacggattcatgattaccgtttacaagaagtccaggacattcccttactgggaaaacaagtaatcctgctccttcgcaaacgccgctacctctgcccatactgccgcaaacggttcacggaaccctattcgttcctccccagctaccaccgcaggacccgcagactggcattttacattgtctccctgctccggcagaccttttccttaaaacagatcgcagagcttaccggtgtttccgttcagacggtctgccgccttctggacacgatttgctatcctccgcctgaccagcttccacaagcgctttccattgacgaattcaaaggcaatgcttctaccggtaaatatcagtgcattctggttgatccgaaaaagcgccggatcctcgacattctcccggatcggacacagagccatctggctgattattggcggaacattcccaggaaagaacgcctgaaggtaaagttcttcgtctgcgatatgtggcgcccctacaccgaacttgcacagaccttctttccaaacgctacaatcatcgtggataaatatcatttcatccggcagatgacatgggcgattgaaaatgtacgcaaacggctgcagcggtccatgccggtttctctgcgtaagtattataaacgcagccggaaactcattctgacccgctataaaaagctgaaggatgagaacaaacaggcctgtgatttaatgcttcactatagcgaggatctgcgtctggcacaccgcatgaaagagtggttttatgatatctgccagatggaagcgtatcgtcagcagcagagagaatttgatgactggattgcgaatgcacagagctgtgggattaaggaatttgaggcctgtgctaagacctacagggcctggcgaaaagaaatcctgaatgcctttaaatacggattgacaaatggtcccacagaaggatttaacaacaagataaaggtgttaaaacggagcagctacggaatccggaatttcaaacggttccgaacccggatacttcactgtacatcataggataaaaaggtcggtaatgcggaggcttatttggcatgcccaaaatcagtaaaacctggaactaaacataaaaagggcccttttcatagaattggggagggattttaacaaatcacaccccaactattgacaaagagcctttatttccatgcgcgtccttgtttctgcatcaatcaggctgcgcagggcttccagccgttcatcctgctcaaagtattcctttccgtattccagattaaatccatagtcaaacccggcaggatttcttccctggctgtgctggataatggtttccgccttatccagggcttttacaaatctggcttccggggtaatgccctgactgtattcctcccacagcccggacacctccccttcctctccttttggcaaaaaaccgcatatccgctgtacatcttccctttcctggttcagtttatcaccggcatccggccgcaatgctgccgatatgtctccgctgtaccgttcccccaggtcgtgaacaaggcacatcatcagtactttctccctgtccagttccggaaattccctgcacatcaccccggcaaacagagccaggcgccaggagtgctccgcagtgctctcctgccgtccctcagcagtccaggcagtgcgcagagtggacttaaggccctcagcctcctttatgaaatctgtgtatgcttccacttcactccccttgttactgccaatcctcataatatcctctcgttcctatccctaatacagattttttaccttaaattccttttccagttcccttctctggtccttcttggcaatgtctgcccgcttgtcgtagagcttcttaccacgggccagacccacctctaccttcaccagactgcctttaaaataaacctggagaggcaccagggtatagcccttctccgcaatcttgccgttcagcttcatgatttcgtatttatgcagcaaaagccttctgacacgcagaggatctttattgaatatatttcccttctcataggggctgatgtgcataccgcacacatacacctcacctctgtcaatcttcacaaaggcttccttaacgctgcattttcccatgcgaatggattttacctccgtgccaaagagctcgatgcccgcctcgtatttctcatcaataaaataatcatggtatgccttcttattgttcgcaaccagtttaatactttccttccccatggtgtttccctttctttccagtcataattgcatgtatgacttacagccttacacggaagctcccttacccgcgctcctgtcccagtctctgggcaggataaaatccactgtcctaagcagacggtccgtggacgccacctggacccgtatgggctggcccagcttaaatgttttcctggtcatctctcccaccagttcgtaatgctgttcatcaaatatataataatcatccctcagctcgcttatgcggaccagtccttccaccgtgttgggaagctccacatacagcccccagttggtgacgcctgatattacgccgtcaaactcctgcccgataaatctggacatatactcgcactttttaagcttgtccgtctcacgctccgcttcctctgcacggcgctccagagccgatgtctgcatggcgaccccaggcagtatggcttcgtaatggccggccctcttgtctcccagtccgcccttcaggctttcctttataatacggtgaatctggaggtccggatatcttcggatgggcgaagtaaaatgtgtgtaatacctggcagccaggccaaaatggccggagcacagggtggtgtactttgcctgcttcatggagcgcagggtcagcctggaaagaagcacctcctcaggcgttccctctatcttatccaaaagcttttgtaattccttgggatgaatctccccctgctgaagccggatgaaatatccaaaattatggataaaggttcccagctgcttcatcttctccggatccggattgtcatgggttctgtagaggaagggcagggattgccagaagtaatcctccgccacagtctcattggctgccagcatgaaatcctctatgatttttgtggcagcattgcgctcatatggtttgatctccaggggctttccctgggcatccaggataatcttgctctccggaaagtcaaagtcaatggctccccttttcttccgcttttccctgagtatgtcagatacctctttcatcagcatgaacatgggcacaaacccctcatactcagccatgacagcttcgtccccgtccgtgacaatggcattcaccgccgtgtatgtcattcgacggtccacatgaatcactgtctccgcgattttgtggtccagcacgtttccctggtcatccagttccatgatgcagcttaaggccaggcggtctgtgccagcgttaagggaacagattccattggacagcttatggggcagcatgggaatcaccctgtccaccagataaacgctggtgccccgctttaatgcctccttgtccaacggacggccttcttttacataatggctcacatccgcaatgtgaactcccaggatataacctccctgtccgttcctgcacagggttactgcatcgtccaggtccttggcgtcctcgccgtcaatggtgaccgtacgcagtccccgtaaatccaggcggccggccaaatcaccggtccagtctgccggcgatgtcaaatcaccaatgccgtaaggtccgtccaaggtttcctcatcccttgtcataccaggcacagccacttcatccggacacccttccacctcgtccatgacctccggcggaaactcctccggcagtccataggcccttacaatggacagtatgtctgttcccggatcattgacatggcccagaatctccgtcactacaccctccggcttatggttcgcgtctccaaactccttaatccgcgccaccaccttatgcccggtgacagcacccatatcgcagccctggggaatgaaaatatccttggaaatcttctggttatccggaatcacaaacccgaagcccttgcttttctggtaatacccaaccacctctttgttggcatgttccagcactttaagcaccgagccttcagccctccggccgcctacccggtcctgggattccaccacaatctggaccctgtccccgtgaagggccgctcctgtcctgtcctcagggataaacacatcctgctccatgccttccacggtcacaaaaccaaaccccttgggatgtccgcaaaatataccgttgacagaaaaaacttccggtttcccatattttcccttcttggaaattccgattctgccctcagataccagatagtccaatacctgtgtcagttcatctctctgtgatttgggaatgcctaaaagcatggccagttcctttgccttcatgggcacgtaggacttgtcgttcatcacctcttccagcatctttgccttctgttccaatatttctttttccatataacctctttcttataaatgtcctgcctgtacgaaaacaggtcaaaacccgcctgaatgaaataaaacacccttatatgaatacaagggtgttttcgtcacttatccttctgttatcttaattaccccatgaccttaagcagcacgttcagggcaatggtaatgagcatgaatgcaatggctccatacctggtaaagtgctccagcgcaccttccatggaacggcctctgttcttactccagtaactgtctgtggagattccgccaattgcgctccccagtccgttggacttaccttcctgcatcaggataaccactgatattgcaacaccaagaattacatatatgattgacaaaataacatgtattactgacatccgcctgcacctctccattttcttatagtcaaacaaaaatattttaccatactttgtcctaaaacacaacctgttttcctatatttttataggtaagacattgcagaagcttcattcaggcatcgcatttaaaccgcctgggaacaaatcatggaaaggctgccctcaaagataacatccccgaatccggcaggcacaataaaatgctgtccctttgataccgggatgccgtttacacttccctctccgtccagaatactcacattggcaaagctgtccccataattctccgtccagcagcctgtcatgtctatcttgtccacagtatagtaagcgcaggtcacaagatgttcttttctaccgctgtccgtctccttcacaactgccggcattgcattttggtcctccttaaaaggcgcttctatcacatcaatgctctcctttatatggagctgcctgggcttcccgccggacagcctgtcgtagtcataaacgcggtatgtaatatcactgctctgctgggtctccaacaccagggtgccgccctttatggcatggacgcatccgggattaatctgaaaaaagtctcccttactgacaggaatttcccgtatgaaatccttccagcgtttttcctctatcatctgctttacttcatccttattgcctgcatggtgcccaatcacaatggtggcatccggatcgcagtccaggatataccagcattctgtcttgcccagagatccgttttcatgctccccggcgtaggcattatccggatgaacctgtatgcttaagtcgttcctggcatcaataatctttaccagcaatggaaattccttatgacagcctgccgcagccccaaaccactcagggtggctctcccacagggagcttaagctctgtcctttccatgttccgcctgcaatacggcaatccccgttcttatgcgcgctgatagcccagcactcgcctgtgcggctgcttgggatatcgtaaccaaacacatctttaagacgtgttcctccccagatggcctccttaaaaacaggttccataaatagtaattctctcatgtctctctccttatttttcccctttttgatgcaatcaatgcatcttcttacatcataccctgctttttccggttgtcaagatttaaatgggacggggaaaggattttccggacgaatcaccgcccggaagcatcccctttcccatctaccgcactacatctcctgcactgcatctcctgcactgcatctaccgcactgcatctcctgcactgcatctaccgcactgcatctcctgcactgcatctcctacgctgcatctcctgtcattgcaggcccctgtgaagtgcgcagacagcacaaatgcgttttccaatcaccttttaaccttccagattttcctcaatacgcagcaactgattgtatttggccacgcggtcagaacggcagggagcgccggtcttaatttgtcctgcattgacagccactgcaatatccgcaatgatggaatcctctgtctcaccggaacggtgggatataatggtgccgaatccggccctcttagccatttcgatagcctcaaagctttcagacagcgtacctatctgattcaccttcaccagaatggcgtttcctgctcccagctcaatgccctttgacagccgtttcgtattggtgacgaacaaatcatctcctaccagctgaatacgtcctcccagttccttggtcagcattttccagccctcccagtcctcctcctggagtccgtcctctatggaacagatggggaacgcatctacaagacggcggtagtaatccaccatctcctgtgcgctgcgccggatttcctttcccgccatgcggctttctcccgggaacaggtacatgccgctggcttcatcatagagttcactggacgccgcatcaatggcaatcttcatatcggttcccggcttcagtccgctcttttccatggctctcaccagaaattcaagcacagcctcggagtccttaaggtccggtgcaaatccgccctcatcccctactcctgtgctgtagccttcttctttaagaagcttctttaaggtgtgatagacctccgcacacatcctcagacgctccgcaaaacagcaggccccgaacggcataatcatgaattcctgcaaatcaactgtattgtccgcgtgttttcctccgtttagaatgttcatcatgggaacaggcaggacggatgcatggattcctcccagatacctgtaaagaggcatccgaagcccatttgcagcagccctggccacggccatggacacgcccagaatggcattggcccccagctttcccttattctctgttccgtccgcctccagaagcagacggtcgatgtgtctctggtccaatgcgctttcaaagagaactgcttcgctgagcacagtattcacatgctctacagctccccggactcccagtccgttgtaccgattcccgccgtcccgaagttctacggcctcgaattttccggtggatgcaccggagggaacggccgccctgccggtggcgcctcctgtcaggcacacttccacctccaccgtaggattccccctggaatccagtatctctctgccggttaccgcctctatctccagttcgtttaccataaaaaaatgacctcctcatatcaatcttatcattgatataaggatagccattttttaacattatatgtatggaatcagtcattttagcaggctcatccatccttaatttatcctggccccatccgcgcccactgtaaatccatccggtgtgaccgcagataccagcatggcccctgacgggtcgcagtaatacagcttatcttcccaggatatccagccggtcttcatatatccctcctggtcaaagaaataccacttgtaattgatatactgccagccgtttgacgtgtaagttccgtctcccttctggtaccaccagccccggtcatccctgagccactggccgttcaccctggtcaggtcttcctctgtaatctcaatatagggagattcctgccattcaccggcattgttcctggaatccatggccctgactttaaaatagtaggtgcctgcctttgggaacttgccggaaaaatcatagctgttttcctttaccgtataggtggctccgatgccgtcctcataagaattgcctccccttcggcacaggcggaccttataattcttagccaggctcatatcgtcccagtgggccaccccgttatcttcatcccacatcagaccgcttacatccagatcctcatcatcctcgtccagcttatccagccttaccaccaggaccatctcttccttatcattcttagtggaactggatacatacttgaccgtatcgccggaaaatgaaaacgcgctctttcccgatttcttaaagtaataatcactgtcagcggaaagccatatctccactttcggcttgtccccgcctacccagctgtcgccctcattgacaatatccacgctctcaatggaacactccccatcctccaggctcacgtccacgtttccgcctatttctcctgcctggatatccgatgtgaaattaagtttaattttccccactggtgtcctttcctcttttgcaaaggctgtaaaggacagggtgcaggccataaacagagctgcacctgccagcacggcatatgctcctcttttcctcatttgaacctcctccttcccgcttgcgtctgttttcctattatagcacatatcatcggcttctgtcatcctccggcacaccaaacttgttccattttcatatagtatagtatgccggggcgttaatggacatccggcctataatgaaacagatatacagggggattgcttttgataaccattagtctttgtatgattgtaaaaaatgaggaggctgttctggaacggctcctaaggaccatgtccactgtggcggatcagattgttattatggataccggctccacggaccggacaaaagaaatcgcagcccgctatacggatgaggtctacgatttcccgtggacggatgatttcgccgctgccaggaacgccgtctgccagaaggcggtgtcggactactggatgtggatggacgcggacgatgtaatggagcctgaacaggctgcccgcttaaaaaatttgaaggaaaccctggacccctctgtggatgtggtgatgatgaaatatctcacgggttttgacgaaaacgggagaacctccttttcctattacagggagcgtatcttaaaaaaccacaagggattccggtggcagggccgggtgcatgaagctgtcccccctgccggcaatatcctatacaccgatattgagattcagcaccggaaggagggcgccggggataaggaccgcaaccttcggatatacgaaaccatgctgagccagggagaacctctggaacccagacaccagttctactacgccagggagctgtattaccacgaacgctatgaagatgcggtacgggtgttcagggcattcctgcaggaaccggatggatgggtggaaaacaagatagacgcctgtctccatctggctctgtgcgaggagcatctgggacatacagaaaaggccgtggaggcacttttaaaaagcttcttatatgacagtccccgcggtgaagcctgctgtgaactggggcggatgaaaatgaaggaagaaaaatacagggaggctgcttattggtatacccaggcattatcctcccggcctgcggaacagacaggcgcttttgtccgaaaggactgttacggcttcctgccttctattcagctgtgtgtatgctatgaccgtctgggcgaccaccgaagagcatggcactatcacttgaagtcacaaaagctgaaacctgaacacccatctgtcaggcagaaccagacctactttgaacacaaactgaaacatccggcggaagggcagccttccgcactataaaataaggagaggtaattatgtattttaatttttccaacggaatgaatcgaaatgataatatagaacaacgcagaccatgcggataccccggaaacaacggttttccaggtaatggcggctgccccggcgactatggtttcccaggttccggaagatacccggaagatgattgctcggacagcgacagctgtggcggcgacagctcagctcagacagataacagatgcccaggtaacggcgggtttccaggtggcaattttccaggcggcgggtttccgggctgctgcccaggacccagaggaccacaggggcctgccggaccaacaggcgctcagggaccaatgggacccagaggatgccccggagcacagggccctaccggaccaactggtgccatggggcctcagggctatgtaggccccaccgggccgacagggcctcagggacccagaggattcaccggtgagacagggcctcagggaccccagggaccaatgggacttcccggaccacagggcatagccggcagcacaggcgctaccggaagccagggaccacaggggcctcagggagttaccggacctgccggacctcagggcatccagggaccacagggagctaccggacctgccggacctcaaggcccccagggacctcaggggccgcagggacctcagggcagcaccggagccgcagggcctcagggactgaccggagctaccggacccatcggaccgaccggagcaacgggacctcagggaatccagggcatccaggggccacagggacctcagggagctaccggcgttaccgggcctcagggtatcgcaggagcaaccggaccaatcggagtaaccgggccgaccggagctaccggggcaactggcgcaaccggcgcaactggagcaaccgggccaactggcataaccgggcctgccggaaccacaggggcaaccggcgcgaccggcttagccgggaccaccggaccaactggtgcgaccgggcctacaggcgcagctggtgggattgcagcatacggcggaatgtatagaacaaccacaacgccaatttctatcggtattgcatctacacaacaagtagcttttaataataccatgccattattaaatacaaccgtggcagccaatgctattaccgtagctaataccggtatatatgagattaactggaagttagtatcaacagcatcagtggcagtggcattaactttagctatacgccgtaatagtgttcctattgcatcaaccaccagtacaagaaccttatcacttggtgttgaaagtttatttgaaggcagcgttattttcaatttaactgctggagatgtaatagatatggctttgtcttctgcactggccgtaacattaactttatcaacaggaacaaatgcaacattgacagtaaagcagcttagctgataattgtttaaaacacctttgtgttttaaacagtgtaaattgatgtgattatgctatattttattttatcctcatttatgggacataacaattttcctattatgtacggcctggctgcaccaaaaggaccaattggggcacaaggacctgctggaaccacaggggctgccggcgctaccggccggtagtcaccgcccctagtccgcacgcccggaataccacagctgccctgctcatgtcctcatgtattcttcttaataacgcacccatggcaggaagcatagaagcacccgccgttgcaaccggaaaattctccgtcacccggccggcataacgcaaatatatgctccgccagttgttcgtttcttcttatggtagatttggtcctgataaacgcgatatgatgtgtcacgtcaagtgaattagggccgaatataccgcaagtggggcatgctttgtcccaaggagacacctacggccgactccttaggtcagatggcgggaatgaattttaagacacgctttaaaacagattccggagagcggattccggttcaggacctatctatccattaaaataataaggagtgaccattatgtattatgactatccagacaatataaatccacaacaggatggccttgaaccatattctgccgaattccgccaaaatggctgtaataatggcaggaacagatggtgctgtgacccatgtacaccatgtgcgccgcccacatgctgcccgttccccggaccgaccggacctatgggtccaaccggattacagggtccaatgggtcccaggggatgccccggtatgcccggtcccaccgggccaacaggcgcaatgggacctcagggctatgtaggaccgaccgggcccaccggcagcaccggacctcagggcattcccggcatgaccggggctacaggggcgaccggccccactggttctacgggagctgccggagctcaggggcctgccggggtcactggcgctacgggagctgccggagctcaggggcctgccggagtcactggtgctacgggtgctaccggcgcccaggggcctgccggcgctacgggctccaccggaactcagggacctgccggggctgcgggtgttaccggagccacgggacctgcgggcgctacaggggctgccgggatccagggagcgactggccctacaggagccaccggaccaacgggaacatctgcaatctcaagcgcaatgtcagcacttaatatttcagcaagtaccatttcagtaacaacagatgggactaatattcctctgccagttcaaccctatatggatggatttgcggtaaatgctacaaatacagagtttacagttgctcaaacaggaacctatttaatttcctatgatatcaaaatgacatccggattaccaatgtcatcaagagtaacattaaatggcgcaccaataacgaattcaattaatacctcttcaacatctacaaatgaatatagtgtgacttttatgcagcctttaacagcaggtgacattttggcattacaattatatggcgtaaatggtccggtctcattacagaccggcaccggtgcatctcttaatattgtgaaaatagcttaatttatgtctaagcataatatgtcaaaaagtgcagattaaaaaactttacgcagtaaatcatgcctcatacaaaatcaattacagggtacgcgcagggccgtctgtccgggctcctgagtatatgctttatacctgttgcagtaaattaataagactctttacagatagatgcatcgttatatataggcttattatgctttgtacaactgattggctgtcaatggaggatgcaaaaacaacattcatccccgccgcatttaatatccttagacttttatcggattcggtcacatccatcaaaacggacaaagcattgatatcaagcaaacgtgaaatctgccagacaaccagattgaataacagggaagccactgctgcaccaaatcaggattaaccgtattcaaatgctattattactgccgatggaagcctgttattaagaatatgacttctcaaaattttaacaaaaactgctcaacctttgccttttgggctgccataacatcaaaagataaagttggtgtgaatatttgtatgggctttcctatgattttaggttatataaatcgctcattaacaattgtttaattaagcaatcaatgggagccgaactaattttgctgtttcctattaaaagcgcctccaccggtcccatgggacctgctgaaactgcaggggcaaaagatactgctggcccggctggacctgtagccgctaccattagcatgaacgctcagaatactgcatcatcccctctggctatcattataggcaaaatagcaatcccgcttccaaacgaccagtttctcaattgctttacaataaatgctgccaataccatttttacgtttcccgtaaccggcacttactttataacctatcatattaaggcaacagacgctctgctcatgttctggcatattctttaaattaacattcccatggcagataccattgatgccctggctgttgctgcaagccaattctccaggctggaactggagctaaacctaatatcatacgtctggcataatgccatcacttcaggtctaaagacatgaggaatgcaggaataaagcgacaggccttcctgccacaattacccagccgtgccttatattttcggacctgcaccattcattataacaaaaaggagagactaccatgtattataactattcagataatataaatccgcagccttccaactatgacccctcctctgccggctgccgcctcaataacagcggcaatgacaggaacagatgctggtgtgatccgtgcaatccatgcccgccgcccggctgctgcccacaggctggtcccactggccccaccggggcgctttatttaggaaaggtgactgtctgtaaaaatgcggtttcgattaaaccgcctcgttatgggtattgacctcgataaactcttgaatacggcggagctcatcagcgaaacgaaatacaatgctgatatagccgccctcgtgtatcttgatatggtctactaattcaatcaaaatgtcccttgtcagcttgtcgatgttctgatattgccggaacgcggctaaaaacgggttttcggtgtcaatgccgttttccagttctgcctgttccgcccggagctttccaatgacttcctccagagcctcggcttgccgttcatagtcctctttcatgtgccgataatcggaatgggaaatttcaccgtctttccagtcctggtaaatcgcttgtttgtaacgggtgattttagaaagttcccgttccttttgttcaatggcatccatcaattttttggactggctttttaccagtggagcccggttgatccgttcaatggtctttgtgtaatcgacagccagataaacctgttgttgaattgcatagaggacagcagcctccaggcggtcatgcttgatggtgtgttttgtgcaagccgttttcgactggtctttataggtacggcaatagtaatacaccacattcccgaccttgctccgggtcatagccttgccacagtccgcgcatttcaaaaagccgctgaacagatagagctttttctgctggggccccgtccgggtgtcccgaataagaagccgctgtactttttcaaaggtttcccggtcaatgattgcctcgtgggtgttttcaacgatataccactcgtcctccgggacaacttcttgaacgtgtaccttgtagcttttcatgcggtaacggccctgcaccatatccccgcagtacatacggttttttaatatggtagtcacagacatcgcacaccacaagggcggctttgcaggatcaacgctgggattttgatatttcagccccaggcgttcccgcttgtaggcggcggggcttaatatcccgtgttcgttcagatagcggacaatggcgtttttgctcatgccgtccaggaacatattgtaaatatcccggacaacagcggcggcctcctcgtcaatcacaagcgcgtttttgtcgtttgggtctttgacgtagccataagcggcaaaggagccaatatgctcaccgttacggcgtttcatatcaaacacctcgcgcaccttgtcagaggtttctgcacagtgattttcattgagaacgccctggatcggaacagcgatactccgcatattctgcggctccttgtagctgtccagcggttgatggtacaatgagataaaacggacattgtaccgggggaaccagtcatccagataatagccctggtcactgtaatttcggaaagaacgtgcaaggtctttcacaatcacgcagtttacacgcccccgcttaatatcggacagcatcctttggaagtcctcgcgctcgtcatcggttgtgcctgagataccgtcatccacatattcgtcaacaatgatgtattcgtccccatcgttaaacccggcaatatgatcttcaataatctgccgctggtttgtaacactttcggactcgtcaagacaacgcatatcttctttggaaaggcggatatagattgcaattctccataccctgtattttggtcttgcagtttcaacaatagcccggcttctccgtgccatgatagcctccttccctatcacattacatatatattgtaactctgttcggagcccccatcaaggatgactccacctctggacaaagtgtccagaagataggggagaggatcacagcccgctttttttgcgctggaagaaatcagaaagggcatcctgcaagggcggggcgttgtccagaaactccacttttacaccgagatcgcccacacggaaacaatacgggttgcccatttctttcagcatataggccgcccgaagttcctgggggacgctcggatcaagtttcatactgcttatatcggttagttcgcctttgttcatcttttgaatatcgacgcaggaaagcgccgcgatatttagactgttcatagaacatacgcctccttcccaacattactatgcaagtttcagtttgtcctatgagaaaaagcacaagaccagcgccacaaaaggactggccttgtgcttttcgtacctctggacaaagtgtccagaagtcaataggggctccgctcatagtaagcctgagcctcctccggggtggtgtagtcaaaaacctcgtggagctccagcatcacctgttcaatgtccgtgggatcgaagccgcaccgttccatcgcggagattacatagccccggcaggccccctcgctcaacggttgggagagcagggcctccaattctggatcgtaactcatagagcgttcccctctttcataaagatataggggagcgccgcgctcattttcttgccctgtcataagacagccatactcggcggcggcgctcccccgcaaagagggcggcggcccggagagccggacaagcgatccggccccgcgcttatggctgtgggccccacgcactctttacggagagggagaaaacctcctctcatataccaccagaaaaaaggggcaaatggagatggtaaatcagaaattttttctcaaatattttttcatacgcttaacgccgctttccacggagcagcggacggcgctcttgtccacgccctcctcacgggcgatctggcggtagctcttgccgaggatcagatgagcgtccacccggcggccctgggtttctggcagggagttgagggcgttccagagccggaagaacagctccttccgatccaggatctcctgggggctgggttcgtgcaggcaggcggaatactcgatcccgtcgtcgcagtccagggaatagtaagccttattgtagcgcacacgctccgtatgggcggcctcggcccgtttcccggccagaagtgcctgggctacctcgtcgggcacctccaccagctcgtccactaagtaccaataataaaaatctttcagattgattgtagtcatgacttgtcctccattttgtttcggtgggtggttgatcggaaacaaaatgaaggactggcggagagcggcaccctggggagccgtcccgtacctctggacactttgtccagaagtggaataaacaaaatgcgcttgcacaacacaaggccgcacaagcgcataaaacgaggaaattatttagattataacaattttcgcaaccactaccagaatatccctgtccggtgcctgggctttttttgataaattaagggcatggacaaggcacagaaacacggcgtacctcctttgccgccgtggatataaaaaaagcggcggccttgaaatgattagtttcaaaaccgccgtttaacttctgaccctatgggacgcataacaacacagccgccaatccaacggtttttttatatgccgtttccgttggcggctggatagatgtttaaattttcaaaaaggttataatgtaaaaccgatttttctctgtgcaggccaggggcaatcatgccactgaccgccatcctgttcgtcttttccagttagcaggtcagttgcggcatctgcaatatagcccaaatagcttgccgcagagttgtcaccgcatagcaatttccacattagcccgccaaaaaggtaagactgagcaaattcgcgccagctatgtaattcttccacgaccttttgagataagtcccaaaggatgcctcttgcttcactctcggtaatccatcccaaatagcatccccaacgggtgagcatcgccgctcggccaatatcccatcctgccataaaaccggggctatattggctcttatactgttgtgcaaatctccatgcccggcttgtggactcccggtcatcctcgtccatcgtttcatccatcagttcttctggcgaagatgcctcactataaagctgataccgcaaaatatagccttcctgcgccagataacggatcatatccaacaaatcacttcggccatctatcccccaggaacggcgaacaagcgacacaattttttgttccataacgggaatatgttcttctacatccattccactcaaatcatggctatttaagttagatacaatacccgacagcaagatgccaaaccgctcccatttgtcatcattttttttgtaagggagcggctccggctctggcagggcctcaagccgggccatggtttcttccaaagtgacataaaggttttgctctagttccaaattaaattcaaggtcatactcttcatcggtgtcctccatctccagcgtttcaagagccgccgagagcacgcccatatcttctccaaacagttgccccattacctcttctgcggtcgaagcggtagcttgtgcaactttatcatttaccattttttgtagcaattcctcattgacagccatctgtgccatatcaccagtcccgaatatctggcccaggatttctacttgccggtcggtgttggcattaagttgttcctcgaccttcgcggcagagatagactcttcttgttccaagtcggcaacctctaatttgtcgatgagttcctcacttttttcaaaagtctttttcatcgcatcggtggctttctcactggcctgttgcgcccgtttcctaatttcatttatatcaagcattttttatgtcctcctcatcagtgggaagtgtatgccataccggaggttccttgtgtcgtgtgaatagtcttttgatccgctttaatattgcttctataaagtgaaaccataaattccccaatataaatacaaccacaaggaatagcaggatcgctccaatttcttctaaaggcattttttacctcactttgttgcaaatctgttcataaagaagtcagtaaaggcggccagttcctcgtcttgtgacacatagacatacaacttttcatcttccagccaatcataggcattgatgccgatatacccttttttatctggataaataataaaagcatccgtagggtatttattgcgataggctttcaaaatttcagaacggcgataataagtcggatcaccgcatccggaaagatcaggaaccgtgggaacaacaacaatcgtctgactatcctcgttccagccgacaatcagattaccgattttcgtcttgcttccgtgaacaaatccataattaaaacggctaacatcctctgtatatccgtaaatcaacctataagcatccccgtcctttacaacctgattaaatagagtacgcattttcttcgcatttgcggaactcttttccatgtcaatttccgggcccttaaacagtttgctgaaaaatcccataattttttcctcctaaatatttgtatttgaaagtgaataaggtactaagtattatgtacttacattgattagctatcttacttctggacaaagtgtccagaagtaagatactttatttctcaaataaaacaacgtccatattcctgctaaaaatccagaaactctgtcggcaacttatcttgaaattgttctaacattttagcagtagttttttgtagaccttgatccagcagatacttgcttacaaatgggtcaaattctttcattgtatgttctccttcagttttatttacatcttcaaaataaaatcaaatagttaaatctgtttttattttgattgaagtaaaatccgcctgaatacagtaccataacagaatattcggacggatttactcaattccatcattcaagcggtggagctctttttcagcttttccagaacatcaacaatcgcattcagttgaaagtcaacagtttcatcagcaacctcggaaacaagcaaggggagggcatcggggagtgctctacgtataaccatcgctaacaggcttaaatttgtaaacagcccaatcaccttgtcatctgctttcaccccaaaactttccaagatttctccaaacaaccggagctgcctcttgcggaacatctgatatttttcctttgaaagacgcttgaaaataagttgttgttcttcaatcgttaaaacggcaatcccatttttctctccgtaacagcaggcatggagaaattgcttcactgcatcgcgccagctcaaagcaggatcagccattagcctttgagcatattcaatgagtttaggctgttgccagtacagagtttcaatcactaaatcctcttttgtctgaaaaaacgagtaaaagaaagttcgcgaaatgccgacttttttatatatttgttctactgttgtatgctgtatgccttgttttgccatcaggtcaagcccagtcgtgataagcaatgttctgatatgatttcgatcttcctccgaataagctacctttggcattcaatcacctcacagacgataaagatatttttttgtttttgtctttattctagcacattcaatggaaaaacacaaggggggggacgtaatgtaactcccatattttcaaatgtactatttgggggcccgcacgtttcggcaagcagggcaagtgtgggcacacttgctatttttgcaaggccggagcccttgcaaaaatgcttgttggggagctccccaaacccgccggacttctggacactttgtccagaagtcctattgtctgcggcccgttgctatcgctcctggaccttatcttcccgcccgtccgggtagccgagcaggtgatccacgtttgccttgaccgccacggcctcccgcatatccgcctgggccttgcggtattccgtatagagagattttttcttgtccgcaagctcccggtgcttctttttcaacgtgtccatcttcgggagcttcgccccgtccaaaagctcattgatcgccgcttttgccgcccggtagtcggccagctccgcctcgtgctgggccagatattttttagaataccgggccgccttgtagccgtcgaacacaggccgggtctttgcgtactgcaccacagcgcccatgagctgggacgtgcgggaaagggcctcctccgtgtcccgcagctccccggccagggaatgaaagcgatccaccgccgcctcggtgctggccgcaagagcctcgtaatcggtgagcccatgctcccggagatactggagcgcggcggccatctgtttgaggttgtaaatcttcgcccaccgcgcataagccgggcccttgccctgggccagccgttcctggatgtcgatcatgagattgacgcgccgggccggagccgggccctcctgggggagctccgggatcggacgctccccggcaatcaccgcccggatgtcctccgggtcaaagccagggcccagggtggacgagcgcaggcgggtgggcttttcctgcccaggggccaggaacgagatcaccccgccccggccacgcttcaccgcaaagccggactcatccataagccgcaggaacgccgcaaagtcggcgggcttctttcccagggcctccacgatggcaagccgcacccgctgtttggccgagggcgggcgctctccgatccactgtccatagtggagaaaacggcccttgctgtggagctttgggttttggatcacggacaagtcatgctccaggcacacccggtcagagagtttccgcagggccgccgccgatctgaaaaaatcccggaatttccgggtgcagtccagggaagtggaattgtagtaaatgtgattgtggatgtggcggcggtctgtatgagtggcaacgaaaaaggcgtgtttgccctttgtccagcgcatcgccgtttcatagcccactcggtttgcctcctccggggtaatttccccaggcttgaacgcctgccggatctgatagcagagcacatccgcatcccgtttctgttcccggcccgtgacggccttgtactttgcttttgctaaaaggaactcagcgtcggcggtacggtgatcgcactcataggcggaaatgagctccccgccctgggttttctccggattttggccgtagtcgaaacggtctttcatggactgcgcgatagtttcccctttgcttatgtgatgggtcattaaccgcgttgtggccgtaagctcacctcctccagatagacgaaaagagggcggcgggaaaatcccaccgcccggtacttctggacaaagtgtccagaggtcatcagctaaacataaaatcctgcaaggcgtatttcatcccatacaggcgatccaggagccagcccccgatggccggaagtccaaagggagaaacgaggaacgccagcaccaacatggcgatgcacccggtttccaatccggcaaaaaagccgcagattgccagcaggacaaaaaccgcacacgcaaggccgcagcacgcccccgcgatgcaggagaggaacgagatcaccgccacggcgaggatcagcacaagaacaaagggggccacgataatttttaagattttacgcatatcaaatacctcctccaaaaatccattgttttcctggtacatctatattatacctctcccggagggggcccacaaggatggctccggctgtccccacctctggacaaagtgtccagaagtcgggagagccggagagcaaaactgctccccggcaggggctaaagctccaccacggcagagagctttttcagcagatcggagagggggccccacagcttttcatagtcccgttgcagggccgtgatctcctccgggtaaatgccgccgtaggtgttggcctggattgccacctggtttagattgttggcgcaccgccgctggagcgacaccaactcccgcacgtccgagaggtcaacgtggagcacatagccgttgagcgccattttccgcacaaaggcccccatattgcggacacccgcctcggccatacgctcttgaagcagggccagctcctcctcggacaccatgacgtgtaaatgaatggggcggcggcgctttttcaccgctcctcacgctcccggctctgataggcgcggggcggctccttaaccttatccatctttggcttttcctcctccgggggctggggagagccgaacacaccgcacagccgcttcatttccaagtcagcccgatcctgttccctctgtttttccatacgcgcacctcctaacgctcgccccggtctggggctttcttttggggagcctccggcccccggtgtccctgggcctccttttgggccgctttcagttgttccgcaatcgggggctggcgtttggccttcttgcgggcccgcgccgcctcctggtgttccattcctttggcggcctccgccagccgctccggggcaacatactctttcaccgcataactgccgaagtccgggtaaaaccacgtcagccgcttttgatccgggacgcggtgagcgtcctcccattttcccaccacctgggcctgtttttccattcgctgttttatatccgggttttcacgggagggccgcagttcataatccgccgcctcctgttcggtcagcggtctggtataggtcagatggccccaggccaaccgggtatcattctccacccaaacgcgcccctcataattgacgatttcatctggggcattgtggggcggtttgggaaacgtcccgatgtccaccgggcgctgggtggaataatacttgtaaaggccaggggcctcggtctgtgcgatcttcaccttgtagagccgctggtactccgtcacccggtttaccaaatccttttccagtttccccaagtcgttgccatagtgcccccattcatactgccgctggcccttatcgtcatcatagcaagcccaggtcacataaggggagggagccgtgggactatgccccagggcaaacccacggccattttccagcatgatggttttcaaaatcgaatacccttgatttttgtccatttcttgcctcctgtcataataaaataggctgccacctctggacaaagtgtccagaagtggcaggtcaagatgtggaaagcatttccgcaaaacaggggcaggccatagaaagatacggcccacccccaaaacagccccggaaaaccttgtaatcagcgggttttccggggcctaattttccacacatcccctccgctttttccgcatatagtcccgcttttgccgccgcaggacggtccgggcgcaagcctcggagcagtaggacagccgcccatcggcagggacggccccgccgcagaccgggcagggcttgaaaaccgggggcgggccctcggtcaagagggcggcctccagcgccggatcaaggggcaggacagcctcccggaaatagcggcaataagcgcccgtccagcactttcccagcatatagcactcacagtccagcggcaggcacccgcactcccggtcatagttggcacacatagaaataaccagcctgcggatggcggccttttcctctcttgtcagttcgcgggccaccccatcacctcccggcgcgggttttcaaaagttcccgatagcaggacatacagccgatcccccgccagtaggggcacccggagcaccgggagcccctgggcgctttggggatagacgaagccaggggccggggcttctgcttcatcattttttcatacgggttacttgtgaaattcattcctcgtcctcctcgctgttttcgtcgggatcgtcctcgtcccatggaggcccatcgtcctccatatcctcataatcttccggctccccgccatagtcctcctccggcccggcggcctcttgctgtttggggcggatcaccttgaaatagaacgcggccccgccgccgaccaccgccacagccagcaccgccaggagcatcccagggttgccgcccgtttccggctcggtatcttccggggcgttttcctccgtttccacgggctccggctgggtgcccgcgcacttgttcttgttgactgagcagacagcgcactccgtattgacagcgcctgcctcgcatttctcagagcaggagcaaaccgcctgttccaccccggcggcctcagccgcggccagcagatcggcctcgtccaccatgttcaagaagtaggtttcgtattgttcgtccttctcgtccacgggcttgtcgtagtcgatgacgagatagaacgtagccccgccgctggtctggacggtgataaactgcttgttggtgtgctcgtcatagagcagatcgcgggtcacaaggttgccatcttccgaaaagccctcgcccggctctatggtgggctccggctccggggccgtggtttcctccgtcatagagggatctccataatcagccccctcgccgctgtccgcaaaggcataggccgggacagccgaaaaaccgcataaaagaacggcggcacaaaaggccgccgtcaaagacttccatcgtttcatatttcgttttcctccttttccgcaggctcggacttctggacactttgtccagaggtgccctcccggagctgttggagcaccaggggcagctccgccagggaaatgctcatgccccgcacgatgtccacaatctcgctgttttccgcctccagctttttctgctccagctccttgagccgggcctgctgttcggctattttggccttgaccttatcaatctcggcctggattttttggcttttgcttgccgccatagagtaaacctccttgtcacggtaaacgcccgtaggcgtaaaaatgagattgccagtagcttgtttgcagatctgcgtaaccgatgggatctccacagtgcagcattttattgtcacctacataaatcccacaatggcttacgcccgccgtgtcataagtacctttgaaaaagaccagatcgccgggtttcggactgctggtaggagtgcagatgttgtaaagcccctgggcccccaggcggcccacgttccagccggagtgattgatgacccaggacacgaagccggagcagtcaaaggatgtggccggggagctcccgccccacacatagggatagcccaggtatttttccgcctcggtgagaatggccgcgaaagtttcatcgtccagatattctcccggtacttcataatcaacaggcggctttgtgtatttgtccacatattcagactccgggaacaggtctggccggttgccaagcgtggacatatacagggaataccgggccatttcctcctcgcccataagctccagggggagatgggaaaggttgcggttttccagcgtcacatagcagatataccaggagtaaggatcgccatcgctgtcgtgccgggtttcccgcaccacgcgctccgtcaagatatactggcggtcaaagagcatttccaaggtgctctctacctgtgaaagcgtccactccccctcgtggagcaccgacaggatggagatgagcacatagggatcgtgttcgatgccgtccaggtcaaaatggtactcatcataatcgtgggtgctttcgtaggtgtccaggtagctttgaagctctgcctccatacccgcataagccgcctccgcccccaggatgtcctcgtcctttgatgggtaggtagtagcgcccacggcccctgcgccagagtttcccagcatcaccagggaagaagaacaggactgcatcataaacaggagcaggacgcaaaccagggccaggagcacccccacgggatgccgcttgataaagcccaccgcctgggccccggccttttccgtggcggcggcggtctttttggccgcccccgcgccgtacttcccagcccgctttgcctgcttctgatactgttttctcatgcggtgccgccgccacatccgggaaacagggttgcgtgtcatttccgggtactcctgggcggccattttgaaatgatagtctgccgtggccttgatatatttggactccgcccgctggacagcctttgccgggtgttcccggactttcttcttgatgaagcgggagccccgccgcagggcggtttctcccaccagttcggagcggtgggccccctcggtgccgacgttctcctgttccacctcaaaaatcttgccatgcacgaagccgtgaacggtgccgccggcggcccggcccacctgccggatggggccgggctttttgggcggcttctgtttggagagcttctcctttgcctgttccagcttcttcccgcgcttctccatgcggagctttgacgcggcggtcttttcctggttgcttttctggcggaatttagacttctggacactttgtccagaggtgctcccggctgtcccggagctacccccgcctggactggcggatgcgtcgctattcggttttcgcttcattctttaaatcctccgggcgggtggtcagcaggttataaatctcccctttggggaaacggtcaataaacgggatggtcacgtccccatagaacagcaggccctcgccggaattggagtgggtgatataggaaagctggtgctcggaaatgccaagctgttttgctaaaatcgcccggtcactttgggcctgggacaacaggatcataaagtcggtgttgtccagaatggcctcgatctcccggctggctaacaggtctttcacatcctgtgtaagtgcgctgggcacacatccctttttgcggagcatcttccacacggccacaaagtagctggcggtgagcgcgtcccggagcaaaatgtgaaactcgtcaaagtagcaccaggtagaaataccgctgtgaaaatttacattgacggcagaggtcacaaagtcgttggtgatgtgcatggcgatcttccgcaggttttcccctaagcctttgaggacgatgcagaccacgcgggcggtcaagtccacgttagtcgggtggttaaacaggttgagcgatcccgtgcagtagagttccagggccgtcgctacacggcgggcctccggctccggctgtttcagaagctcctcgtataagtcctgcaaaagcggcacctttgccgtatcaagccccagggccgcatcccggtaaatgagccgcacacagcggtcaatcaccgtcttttcgatgggttgcaggccgtccttgcctcccaccaccagttcacacagggacaacaaaaaatccgctttcatagaaagcgggctctcgtcatcgtccaggtcaagctggatgtccatcgggttgatatggctgggggagccgggggcaatctcaatcacttgcccgcccagccgccgcaccagcggggcatattcccccatcggatcgacaatgatactccgatcctggggaatggtgagaaagacgtttaagagctccctctttgccgcgaaactcttgccggagcccgtggagccaagatacaggccgttggcggattttaactttttccgatccgccataatgacgttgtgggaaagggcgttcatcccgtaatagagggacggcccggccatccgcagctccctggtcataaagggaatgaaaatcgccgtggagctggttgtcatgcctctctggatttccacctcgttatagcccagggccagggaggaaacgaagccctgctcctgttgccagtccagccgcttcaatgcacagttgtatttctgcgcgatgccgcccaccgtgaaaatatcgttttccagccgctggcgggtgggggcaaggtttaccaccgtgaacgtgagaaggaacatccgctcgttgcgggactggagatcggccaaaagctccgccgcgtctttggaaaacgtgatgaggtcagggggcaggatgtccgggtcatatccggccctcaccgcctttctctgttcctccaccttcattttgccaatgtcagagatttttcccttgaccgtcttgatggccttgagctgatccaccgtctggacgtgcatggtcacagtgagctccgcatccagctccaggatttccgcaaggagcttgtcggagagctccgaagccaggatctgcaagtaagaagccgcgccccaatactggcccacccggaacaggcgggactgccgaaagtcgaagctgtccggcgcgatatagtcctttgtccccagcccggttttgggaatgtcctgccaggagaagcggaacggctcccggttgccgggatgcatttgcccatgaagcagggccagccgcgcctgtccgtccagggcctcggagggcacccccagccgtttgaggttgcccgtcacatccgcctccacacgctccagccggggccgggcctccgcaatcccctcggcggggagcccgaacgtgatatatttggaacgctcgatcccgttgtttgaccgggcgatctggttttttaacatcccggtaaattcagcccggatgctgtcaaagtcatcctgggcctgtgggatgttcaccttgtacttgctccgggaacgggagcggcggttgataaaggaaagctggaacggcagggacgtgtcaaagtaattgagaaacgagctccagccgccgaaaatagcagtttgatcctcggtgcttgcaacagaatagttgatgtcctcatattccaccgtctttgtgtagagcccgccggggagctggcacacgccgtccgggtgcatcaccagataggggatcgtctgctgggcggacagggccgcccggtttttcccccggcgttcagcccttgcgggcccgcgccgtgggtttcttattgccttttgcaatcgcatcctcctttctcacagagccccgctgggtgaacggggcatagatattttctgtccgatagggcctcaccccaggccgcaggaaacgggcccggatcacattcctcaccaccttttccagcgggagcccgtctttttcatacatcgccagcaaaaacgccgggagcgccacgcccatcagcaggaacatggccccggtgttgccaagcgtaccacgggccagcagataggacgggacacccaccgccgccgcgatcccaaaacacacaagctggcggcgggtcaaattaaaggcaagtttcgtcttgacctttgataaatcgttgggaacatttacatagggaatttttagtcactcctttccggcccgcccacctctggacaaagtgtccagaagtcgggcagggtactttccacctcattcccccacacatcccagccgggcggggtctgccttgcaaacagctccaccctgggcacatcgcccatgagagccacgatcttttcacgggcctcctccggcttgcggctatgctcccggatgggggagataataaactggtggacgttggccgcctggcgtttcgggtgtccccgcgtcgccagcaggcaaacctccgcgttgcccctcgtccaaaagcccaagccgtaaaaccatccctcggacttgcggttttgtttgagccagacgaaagccacagacttatattgaaagccccatgccttaatcagccgcagggcctccgggagctgggggaacgtggcccacataaaaagcacgctgtccggggccgcaagatcggccacaggcagcgcacataactcgtcaatccccattgtggggtaatgcttttccgccgccccctggacggcgctccgctgataccgccagggcggatcggcataaatcacagaatagtgtccgatagtcaaactcctttccccccagccaccaccacctcctgcgccacgcggatgcgctcgctggcggcggcatagtaggccggggccgtttcaaaacagataaagcggcggcccgtattgagggcggcaaccgccgttgtgccggagcccgcgcagatgtccgccaccacctcgccgggccgggtgtaggtcttgatgaaatactcgcacagctccacgggcttctgcgtggggtgcatagtgcgctgtaccgtggggaacgtgagcacgttccccggaaagcgcaggccatcctccgagccgcccccggaacgggtgaatttcccgtagttggtgctgtttccgttgtttgacgtgatctttttatagggcttgccctgttcaaactgcggattgtaaagcggggatttttggtagaataccaaaatattctccgtctttttcaacggggcccgccttgcgttgagaaacccggtgcatcggctcttgtaccatacccactcatagcggagcatggagaggttggacgcgcccagcactttgtcataggggcactgcgcgaagaacagcaccgcgccctccggcttgacggcccatttcaccgcctcccacagctccggcaagggcaacggcacatcccaaaagttccgggtggtgccgtagggcggatcggttaagagcatatccaccgaatgacgggggagggagcgcaggccctcgatgccgtccataaggaacagcccttctgtgagctccggggacttctggacactttgtccagaggtgcaggacattgttttttccattccagcacctccccttaatgcgccccaaaaatgcgctgggcgatgccgcctgtcttaaacagcataaagcagagtaaaaccgtatagccaacgatgccccaaatcgccccaatgggatctccgcttgtgacgatcccctggacgagcaccgcataaatggcaacgcacaccagaataagcatcccttgaaaacccacggcaaacagggagcgcaggtaattttgccccgcgccgcccagctcccggttagatagggtagccacaggcagaggggccaaactggtgagcaaatatatttcaatcatcctgccatagaccaaaacgaaaatgacgatgcccagcgcccacatggtcacgccgataatggaggactggagccacaggcccaaaagcggccctaaatccattccctccagcgttgtttccagttcggccagcatatccggcgtgacatccgtggagccctggatgagcccgcccgcctgggcaatcacggactgggacacgtcgaacaccgccatcacgatattaaaggtattagacagaatgagaatggcacaagccgtcttaaacatccatttatagatattcgccacgtcaaactcgtgcatattgtttttctctaaaagcatttgaatgagctcataggtggcaacaaaggtcagcaccagcccggcaatcggtaagatcaccgtttcggaaagctggcggatcagggagaaaaccccggcgttccaagctgccggggtagtccccacttgtaccgcgatctccccgacctgggaattgacgtaatcggtgagcccctccaggttgcccatgatcccgccaatcagcagctctttgagccagtccgtaagccagtcggtgagaaaatccataagccctccttaaaacaggccggacagcagggggatcagggtggtgcccagcaggatgatgccgccgcccgccatgagctgcttcatgccctggcttttcgatccagggttatccgatccatagccctccagcagattgacaacgccccacacgccaagaccagcgccgagagccacaaccagggtctgtaaggtatcgacagcagaagaaaagaactccatatagcctccatttctccggggatattcccggccatgaaaaaagccgccatttctggcggcaggttacgacctctggacaaagtgtccagaagtgggatttatacataggcatccggatcgtccacgtcgtcatagttgaggatgtcctcgtcctcgcctatgggccccgtgtccgccccgtctgcctcgtacacttcacaagcctcagagagcccaggccgcctgcggcggtttatgagcttgtcgaggtcaaaagcgtttttgactttatcggcctcagccgtgtatttgtaattcgggtgctgtttcaaatcgtactttggggaatagaacgggggcaggccccggagctgtaaaatacagcgatcccccggcatagtggcaagctcggcgggtgtcatcagctcccggcccagccgctgggtgttcagattgtagctttccgactggcccttagagcggccatccgtctgcatatagatcgtggcctttcccagccagttttctgaaatctccttgatggtggagctttccctgcctcccagaaaaaccacgctgtccatatttccgagaattgtttccgcgtgtttgtcataaatggccttgcactgcgccatctgctggtaaaagagcgtcagcgacacctcacgggagcgtatgaccgccaccagcttttcaagctggggcacctgtcccgtgttggccgcctcgtcccacagcacccgcacatgatggggcaggcggcccccgtggacgttatcggccctctcgcacaaaaggttgaacatctgcgaaaaggccagggcaacgataaagttataggtgggcgtggtgtcggaaatggtgaagaaaaccgccgttttccgatctccgatgcggtcaagctccagctcgtcataggacataatctcccggagctgggggatgtcaaagggggccagacgggagccgcaggaaattaaaatgcttttcgcggtcttgccgctggccagcttgtattttttgtactgcttcacggcgaaacaatccggcttgcgcttttccaggcccttgaacatatagtccaccgcgttctggaagttttcatcgtcctccttgacctccatcccggaaatcatatccacaagggtattgatgctccgatcctcggcgggggcctcgaaaatgatgtaggcaatcagggcgcagtataaaagggtttccgcctttgtccagaacggatcaccctccttgccctcgccctttgtgtttgctatgagggtatcgacaaactttaggatgtcggcctcgctgtggatatacgacagcgggttatagtgcatggattttgaaaaatcaatgctgttaaaaaccttgattttatacccccggcgttgcagaaagcagcccacctgggacaaaacgccccctttgggatcgaccaccacgaaactgcatccgccttttttgtccgcgcttgcctgtaaaatctgcggcgtgagccaaaaccgggttttgccggagccggacgagccgatgacacaggcgtttaggttgcgggcgttggccggatttttgggccgggtgttcatggtgagaaactccgtcccggtgagaatgacgttgttttcaaactttggatcgacgaaaggggctatatctttaggcccgccccaacgggccgatccgtattcttcatcccgcctgtattttttggcctttttgcttttgaagtagatcagcaggcggaagcccaccgcgcccacaatgccgatgagccaatcgagtggatcaagccccggcgcgaagtcggcaaaggccgggcccaccgtctgccccaggcccatgagcttatggggcaaatccgcgccctcggccagccggtaggctgtccccagcttcagacaggcccagccgatgaataggtacgggatgtttggaatgagatattttttaatgctatctatcctcatgcgccgcctcccttgcacgttcttttttgtgggacggctggcgggccagcagatcggcggcctccttgagctgttcccggatcggcgcttttgtggattttgtgcgctttagcaggcgtttggaatactctgaaaagcaggcggtgatcgcgtccgcttgcccggacttgaaaaacagcaggtgcttatccggcgctaccttataaaaggcatagtccacattccacttccgggccacccggtcaaagagctttggggcctccacttcgatgctgtttgtggcgactccttgccccatgagctggcccaccgtctgcctgccgtgtggggcttgctttgcccggtgcgcttttgtgattttccgccccaccgcctggagcacatacgcaagcccccgcgccgtgagcttgcttgccttaattgataccgctatggtgcgtctggaaacgtcctcgtctgtcagcctgatctctcctttctatggaaaaggcacctctggacaaagtgtccagaagtgccgctatcggtctgtatggccttgctccgggcggggccgttccgccgcctggggaaaacggtcaatgacctccttgtaggccgccatctgctcccggatagagagctgcgggtaagcaaaaaccttgtgttcggcgggaatgtcctcccgcccgtgatagtgctccacaaattgacttccactgcctaccacatagcccccgtgggaaaaaccgccatcttcattgatccgcacatcccggccatacgcctcatagttgaaatagtccagcagatgatcgggaatatcaatggcatccatatcctccacatagacacggcccagggtttcgtcatcccccacaccgggataaaattcgtaagcgtccaggttttccacaaggttgattaggtcggccacgctggatgtgtgttcgccgcagtcaatcaccgcttcaaacttttccatgtcgctccgatccagctcggagagtaggcaggccagatggttgagctcgtcaatgctttcatattcccccaggcaggcgttgagctccggcagtctgccgtcatagtcggcaataaaaatttcctcataccggatattgtcaatgccgatccgtttcagcgccgcctgtacttcctctttggtagtggggaatttcaagagcgtgctggcaagctccccctcattgtatttccccaggttggtgacatacgcctcaagaataggctgttcctgttctagtccaatcacctcctctggacaaagtgtccataagttaccgggcctcccggctcacggcgggggccgcccgttccttgctttcctgggcttttgccagctttgcacattcttccattgtctggcggatcgggggccgggccgcctgctccaagtgttccaggcgtttgagcaccccagccgtccggctctgcatcgcgcacatcaaccgccgatcttgccgaaaggggagcgagagcccacgggccagagcgccgggcccgttgggatcgtccaggccctcccggccctgcactgcccggacaatgtttttcaagtgccttccggcctcgtggtattccttgctggccgcctcgataatggatagcgccctatcgtcaaagacaatatttttttccagttcccggctgatcccctccagggcaggccggatgtgcagaaactccgccgtgtgcgccagggccgacacgccgcgctcccgaaaggccgccagcgtctttttacagccctccacaaccttttctttcaagctgtccagccgcccccataagccatttgtgaccttttcaagccccgcaaccgtcttttgcaaggcccgcttcaccgggctttccctggcctgggccagctcctgccgcatcacagacagctcctccaatgcggaattgagctgttgttccagccctgcgatctgctggcacatagccagcaaatccccccgtccgggggaattgtgctgtttcatcacttccaggagctcccggacagcgggctcctccatcagcgggacactacggggatgtttccgcttagacattgtggcggccctggcccttgaccgtcaaaatcccctccagggtggtagacgtaatccccagccgctgggccaccgcaatatcatttttcaccgcctcattgataaagctcccgcataccaccagcacatgggagcgccggagcaggtcacggcccatgtcaatgccgcttttatgttcctccggcactacgtcattgaggaacaagggaagatatatggccgggcagataggcgagaagcccgcctcatagaccaaacggcagtagttcgccgcctgttctgttctttcacagtcatcgccgcgccaagcggcggtaatatacgcaagtgggcgtttcatagtcaaaacctccgtttccttatatataataggtagggtcaaccctatccccccgccctttccctatccagggaaagggggcggctctggaggatatatgcccccgccgcccagccgggaatagcacagccggggcaggccgtaaagggcaagccgccgcaagcggcgggcgttccgccccttgacggcccgctcccggctgtacgaaaaagtacccggcgacgggggatatatcaccgcagagcccatcccaagcgcgggacgcgcacctctggacaaagtgtccagaagcgggggcccggttacttttcgagctcgttctttttctccggctttgccagctccgggggctgtttctctttccactcgtccagcaaagtcataatctgttctttcattttggcaggagtgacctccttgccgaaatactttgacagttccgccattgaaataatcacgccgcgctcctcctttttttcttcacttaaaataccgtcgatcacatcgccgttgagcagaccctccttatcgagctcccggagcttttttgcctgggccacggagggggaagcctgctccccgtcaatggacacagcgatcagccgctggttttccggtttgatatacgaaatttccacagcaggcataaatcccatgcttttcgtgtccaccttatccagaagctccgggacgaggtggttaagccggacatagcggagcacctttttatagttcatatcgtgctccttgccgacaatctccaccgagagcttacccagggcctccgcctccttgtcatttttgggccgggccccctggcgcttgatagcctccagttccagatcaaggagctttgcaagctcgctgggcaggggatcgccgcgctgtttgttgctgttcttcatttcccggacggcctcaagatcggtcatctcccggacaatacagggaatttcatccagaccagcccgctcaccgccatgacagcggcgatggccagcgatgatctcataaccgttgccgtccttttccgggcggacggtggcaggggtcataatgccatgctccttgatcgtccccaccagatcgtccatcgccttatcgtcctgcaccttaaacgggtgatcccgtaaagtatggaacgggtgaagctccgataatttcagatagacgatttttccctgctccaccgggcggggcggcacttcgggagtgggcggcaggtggatctccgggggcggggccgccgcctccttgactggagcggccttgccctttggaacctttacaccgggcccggcacccccagagcccgtttctttgcccttatccttttttccacctctggacactttgtccagaacaccgggggccggggacttgtcaagggccgccttgtcagccttagcggggcggcccttgcgggtgcccggccccttttccgacttaccgggctccgtcttatcctttgcctttttcgtgcggccctggtgcttttgcgctttttcctcctccttgatttcatccagggacttttcccaggggggcttttcctcgttcccgaacaagtcacggaacgcctcatccctatgtttgggggagccctccggggcagccggggcctccgcctttgatactgcttcacgcgccgccgcccgccgctgggacataagctcgttgatcttgtcaaaatcaaccaccacctcgcccggagcagtccgggccggggcgtccccacctataccgggaagaacagactgctccggcggggatgcctggcttgcaccggactccaccactttttccggcgcggtagtttccggggccttttccacaggggcatcaccggggctatccgagccaggggactccgggcctgttttcagcttgtcatctgccattcactaacctcctttaattttggcgtgttgcacaaaaatcagctttaattttctaccagaaaaattttcctcctttccaagcctaccacgcaaaaaagccgcccagttttacccggacggctttcagcgtaatgtgatagtcttttattttttatttccccttgatttttaagggttatagccactttccttttaacatcgccccgaccgggcccatgggacctcagggaccaatgggacccagagggtgccccggcgcacctggccccgcaggacccaccggtgccatggggccacagggttatgtaggccccaccggccccactggccccaccggacctcaggggtttcctggaataaccggcgctaccggcgctgccggcccaactggtcctcagggcccgcaaggcatacccggacctaccggcccccgtggcgttaccggaactaccggcgctgctgaaacgataactatacgcaacactgttacaagcgaacctgaatctccagccgcagtagtggatataaccggttcccctgaccacatcctggacttctatcttccgcggggagccacaggtgctacaggagctaccggcgctacaggacctgccggtgacacaggagcccgggggattacaggtactaccggtgctacaggagccacgggagcacaaggtattgcaggcattaccggacctaccggaccacagggacctgctggcgccaccggacccacaggaccacaggggcctgccggtgctaccggaccggctggcgctgcaggggccacaggaaccaccggcgctacgggagccacgggcgctacaggggccactggtgttaccggggctactggcgcaactggagaagcacaaactataaccatacgcaatactacaacaagtgaacctggtgctgccgccagcgtcacagatataactggcggtcccaaccatgtgctggatttcaccattccacgtggagtcaccgggcctgccggcccccagggcggaacaggagcaactggagctgccggacctgccggggctaccggtgccacaggcgctgccggacctgccggggccactggcgctaccggtgccacaggcgctgccggacctgccgggccaactggcgctaccggcgccaccggtgctatcggcgccaccggcgctacaggggctaccggtaacacggggccagaaggacctgccggaccaactggcgccacaggggccactggagccgcaggagctaccggtgatacgggagcagaggggcccgctggcgctaccggcgccaccggcgatataggacccacgggggctaccggtgatatgggaccagaggggcctgccgggccaaccggagaaaccggaccaacaggcgcagcagccaccatcaccatcggaagcgtaaccacaggcgaccccggtaccgaggcatctgtaaccaattccggcacctcagaagatgcagtctttgatttcgtcattccccgcggggagcccggaggcggcggggctccggaagtcctggcaacagtagatacaacccctcagcccacttcggctaacggggccctgattttcaacgaaactccgctggtatccggaactgccattacccatactgctggttctcctgatgtgcagattaaccagcccggcatctatcaggccttctttaccggtacagtcctgattgatgcagggaccaccatcccctctacgctcacagtccagctcacactgaacggagttcccattaccggagcagtggctcgccacaccttcactgcttccaatgaagaagtaaccctttccatgaatgcaccattcccggtaaccggcgctggtactctggaggttgtaaccagcgatgccggatacacctttgaggatgcctccctgaccgttgtccgtctgggagacagcactaatttccgcacagctgtataacaatcaggaaaatgttcactggaaagttaaggccgccggaaaatatccggcggccttacacaatccgcttatatggcagaagcccgaaacattactgcttttctgcacattattttacagcaattgcctcaatctcacagagcacaccctttgggagagtcttgactgccacgcagcttctggctggcttggatacgaaatacgttgcgtacacctcattaaatctaccaaagtcattcatatcagccaggaaacaggtggtcttaaacaccttgtcaaatccggtgccggctgcctccaggattgctcccacattcttacagctctgctcagcctgggcagcgattccctctgccacggttccgtctgccggatccaccggaatctgtcctgacgtataaataaccccgtttacctcatatccctgggaataaggcccaatggcacctggcgccttgtcagtactaagaatattcatctgaaatacctccttcatatttataatttggacatacgtccacttaatgttatcgcgttcacattcaactgctccctattatatcagatattatctgccgatgcaatacagatgcttcaatatccccataaaaccctgtaaaggcctgtaaaatacagccctgtccatattttttccctatgccgcgcatcttcatattcaggtcttcataatcagtcgtcccgcctatggacattacgtgtcccatttgttataattgaaatgttttaatcgcattcacatccaacacaccaacaaaaaaacagaggtatagaaatgacaaatcttaacgataccggggagtctattcccgcataccatattgaccgcaccctatatgagggccgtcccgccgacacatccggccgtgaggataaagaaatccgcacctatgatttgctggattcccttcaggtcccctttgtccgtgtggaccacgacgcccttccaaccattgaagcctgccgcgaggtagaccagcttctgggcacggaaatctgcaagaatcttttcctccgcaatgcccaaaagaccgacttttacctgctgctcatgccaggcaataaaaagttcaagacagctgtcctgtccaagcagattggaagcgcccgcctgtcctttggggaggcagaattcatggagtctttccttgacatcaaacccggatccgtgtctgtcatggggcttatgaatgacagggaaaaacgcgtcaggctgctgattgacaaggatatactggaaagtgagtatttcgcctgccatccctgcatcaacacctccagcttaaagttcacaacccgtgatctaatggataaaattctcccggcccttggacatccgcacacagtcgtggatttaccctatgcagaataatccatgtaacagaagagccggcagccacaaaggactgccggctctccctgcattggggtgcattagcctaactatatgcattggggtgcattagcctaacctctagtacttacaatactccttccggattccttccatctcttcatggatggccggaacatccataaccatttccatcattcccacctgttcctcataaacagctggatctgtctcagccttcacttcatcctcacagatatgatatacacttagtcccaactggactcctgccaaaggacctgcataagttggatcgccggctgtaacggtttctgctgcaaggcctgcggcctctgcttcagcagctcccagaagaactactacgttctccgggccgtgctcctcacttatgtttaaaaccctcttctggttttccagatccatggcacctgcggacgttcagacaaagcactctgtggaagagtaggctatctttgcgcctgctgtcttggcacactcttcaatggctggtccgggtacgccgtcgcggtcaccgatgatgatagcatacttgtctttcagtatagccatacattgttcctccttttctttattgcgcttaaaagcgctgtttttatacatcagccgcgtctgcggttatgcatcatttgtatccggcctattggccgtgccctggcatcaggcatatttcctgatcatttcctcgcagccctccggggtggcgtcatcctttaccctggaatcaatcatttccccatccttatatatggcaatcacaggcagtcccagcaccttctgggcaatggcaagccgtctggcctttgtggtgttcagggaacagaattttacagttgttccgtacacctcctcaaacttatggatatggggcataagggctgcacagggaacacagccgtccccgtaaaagtctaccagcacatagccctgggcctttaatacctcttcctcaaaattttccttggtcaaatcaatcatttttaacctcccaaatgtaatcgcgataacttatggttaaatagtttctttatatccatttccaaaaaccgggcttttcaccgtgtttgtccttgacaaaccctggaaaacagataatatattaagttagtagctaataaaattttcatccaatgataaggagtatcactgatgagcgatattaaactgactgagttaacaggttcctgcggcggctgagcgtccaagatagggcctgataccctcgcgcaggttctgcgcggtttaccaacctttcatgacgaccggcttctggttggatatgacacctccgacgatgcggccgtctatcagcttacccctgaacttgccctgatacagaccgtggacatctttccgccggctgtggatgatgcctatgagtacggccagattgccgctgccaactcactgtccgacgtatgggccatgggcggggaagccagactatgcatgaacattctcatgttccctgagcacctgccctttgaaacggttcaggctatcctccggggcggctatgacaaggtggctgaagctgaggccattgtagtgggcggccataccatcaaggatgacatccccaaatatggcctgtgcgtctcaggcgtggtccatccggaccgcatcctgcgcaataattccatccaaaagggcgatgttctgattctcaccaaacctctgggcaccggcgttctgaccaatgcggacaggggcggccttttatctgactcagaacataaggccatggttgactgtatggctgcgctgaataagtatgcagccgatgcggtacgaaacctggacggggtccatgcctgcaccgatgtgaccggcttctcactgctgggccacagctatgagatgtgcggggaatccggacttactgtaatcatagacagcagccgcgtccctctgctcccgggtgcggacagctatgcgtccatgggacttgtgcccgcagtggcataccagaatatgaatcacctgaaggataaggtagcgctgccaaaggaccttccgtcccatgtacacgaccttcttttcgatccccagacatccggcggcctcctgtacagtgtggcatcccaggaagcagggcgtatcatggaagcgcttcagaaagcctgccagtccccggctgttatcggacatgtggacgggccatccgcccacccggtcatggtgatttgacaaaattttcacaaaaaggaggcagacctcttatcccagctttacaaaccgggagcggacagcctgcccccttccactctgctacatttagtacatttctaaatatccttacagcagaccaacaggccgctaaggaactttctgaccctcacgttgccgtgtccgtcgctctttcctctgatatagctcatctcccgtttaatctgttccagactgtatagcctggctccatactcgttaaacacaggatctgcataatcatccattcctctgtatgccagattcgccatacccacagaggccgcgcgccgtatgcgctgctccacactcttggaattctgtcccatcctgctgcacagctcacgtaccgtgatgtctcttatgtccaggtcctcctcaatcagatagcggacaatccgtataatatccttgcttcccgcctcgctgagtatacctatttcctgtaagatgctctttaagcgccgtatggactggttataatctgtttccagttcctcgggctgcatctttcgtacccgcacatttgattcccatgaaaatgccccggcggaaaaatcattcctggccttgacaatcatccactgcatggccctggacatctccatattgtgcagcacgtttctaacttctatctcattgaacggtttatgtatcaaaagctcagcgcctttttcataagccatcctgataatatccatatcattgacatgcgaaaggataacaaccgatgtctggggcagtacctccctgattttctgtatgtaagcaatggttttgggtgcggaaagggtaaggtctgccagaatcatatccgggcacatctcctggagctccagataggcttcctcccatctggatgcaatgccggcaacagttcccataccgccatcttcaatcattgttttcagttctgtccgcgaattcctgtcgcagtccacaatatagattctcatcctatttcttctttaaaaatacatccttaatatttttccataacatgaacagtatcagtactgcgcccacatatccgttgagcacgtaaatgatgttaaccaggaccctgaaaggaaggaagagtcctacaatcagtccaattactcccagtgcaaccgtgaggatcttaaactggctggttccctcttttgcgaacctgccgcatggattatacagaagcggcactgctgttgtataaatacctgcaaataccacgactgcaaagaaggatgcaaaaggcttccagatgcgctctgccaggatcagattggggatgtcagcattccatacgaagatgcctgtatttcccagacctgctgtattaatattggcaacctgtgccagcatgataaggacaatggcaacgcatacagcgatggttccgccgtagatgccatactccacgtctttctttttattattggctccaagcgccgccgtaaaactggcaaaccacagaagcacgaatcccgcataggacagggcggatatcacccagttaggtcctgcgttcttgattgtctcactgcccgcctcggcaaatgcacctgtgcggataacttccagtccggctcctacattaccggcatccctgaacagggtaaccacgccgataccgatacacagtacaacgatagccgggccaaccacaccgatcttgtcaaccagtgagttaagtccccctaccacggtaaggattgccagtgctgtcagaaccacgccgcctacccaggaaggaaggccatactgctggttcagtgtagaggcagcacctccaaccataacgaaaaatgacatgtaacaaaatatagtagaataataatccatgaaggtcccaacgtatttaccgcagtaaaacttatatacgtcatttcctttttcaaagtgctcctctgctccggccttggcaaagttgtaattgtagtagatgaagcagaccgcaaacagtaacaccgtaaaaattccctgcaccccgtatgcagtataatactgaataatctcctgtcctgttgcaaacccggaaccaatggtaaatgcgatgactgctccggcaagtataagtacccgtccccagttaactttcttatcactatccatacgccttctcctatccatggtctgatacagcgccgtaacgctgtcctaatttatgccggcgcagcgggcaagctgcctgctgcgccggatttgtcatttctgtattatttctcaaacacagtctggccatcaaccggtgtctgaagtgctttgagagctcttctgaccatggataagcggagtttgtagctgtccttctcgccctgtggcggatcgcccagaggataaggaatgcctataccaggaataatacggttagcgcctattgtcagtgaaatcggaactacagtagccatgtgaactaccggaatgccgtatttctcgatacccttaaccatcgttgcaccgcaacgagtacaggtacctcaggtagagacgaggataaccgcatccacatgctcatcaataaacatctgtccaatctcgctgccgaacttggctgcagatgcagtcgcagttccggtaccggtagtagtgcagaaatagttcacaagctcgccgaactcgcctgctttttccagttctcttaatgcgtctaacggaacaaccacattagggttggccatagcaaactgacggtcatatccgccgtggatggttgtaaattcatccgctgacagacggtccataccggtgatgtcatacttgccccacttggtggcgttggaggactcgatatggtcagggttaccggttggaacgataccgccggaggtaaccactgcaatctttgcgtgcttgatatccttaacaggctcagcaggcgcaactctgtcaaatttaggcataggaaggtctgtgccgtattcctcgccttttaacttcttaaccagcatctcaagggcgcgctcagaacctctcttctcagcgaagtagtttacgcggattcctctctcgatgtatccttcttccttcggtccaaggatttcctcgccggccgccatcttcttaatcagagcggacataacaggaagtacctttggcataccggctgcggagttaggtgtatccacaatgataaggtccttgcggaacatatccacgccaggattctcgatatacataccggtgataaccgggatgcccagacgctcttccactgccttgcagatagtaccgcaggcaacgccgtaacgtccggcattgaatgcagggcctgccacgaatacatcaggctcacatttctttaccatctcaataatggtatcggttgcagcgtccagattctctccgaaatagttgtcaccgcagataatggttgatacgatttcataatcctctcccagtgcagccttaagtcccatacctggtcctacaaccccttcccgaagctcaggggtatagtcggctttttcttcaccgccgattccggcaaagaactggttaatataatgtactattttatatttagccatctttccatctcctttattttcgattaatagcctctagctgccagcttgttgaaaccattggcaatggtggaggcgatgataatctgaagctctgcctcaaagctgccgtccgggttcttacagccgtcccagccgccaatctgcatctcgatgaagtcctgtgttccgatgaccttatccatggccgggaactggagtgtggcattaccctgtccgcaggatgccagtgcgtcagcttcctcgcacacgtcagccagagactgggactttccgtccttgcccgggaactcgtcggtaatcagaaccaccttggttcctgcgcgctctaccttacggcagttcatcatcaggtcagtatcaggattgccgtatccctcctcggtaatcagcacaccgtctaatcccatccagttgcacagcttggcaaccatatcggaatgacgctctttgtctgccaggaatacgttctcgtttgtcaggataacacccatgaagttgatatccttgccatggtgcttatagcagtcctcaataaccggattgtggaaatgatggtatgtggtaaccttgtcacatggcgcaacacagttaccggaaacaatagcgccgtccatgatttctgttggatacataaaggtggggataaactgctttgcatccacgccgtagtaatatgtatcatgcagaagtccctgtgactgcagcatatggatgtagcctacctttggaaggtccggatacatagcagcctgctcgaaaataggctttgtctcataagtaacaatttcatccggctccagctctcttgctgcctcgcctacataagtcgctacctttaagcctgccatacgagcagccttctcatatacatgagtctccaggccgtcagccggctccactacaacgcagaggttataggtctgtgaaaatgggcagtaatccgcagcagggccgctcatgtcgataacgccctcctggaatcctacgattttaccaacagtcactacacagcagccttccagagcgtgcgttcttccggtgcccacctgaggacttacctttccgatcacgcctgggaaaatctctccgccgctgaccttaacccttggctcaatcacgtccttaaccggtgtaatcctaacggactcacctggctttgcaatgtcaacgtggcagccggtcagcttatcgtcttccagcacaagcttttcaacttcctctttgttgacatagagcactccgtctttcacgtgagtcttgtcatcgaatcggatatctttgataaagatttttcccaattcaagcttcatatgaaatacctccacttctttatattttactgcctgattgtccatgatattcccatatatccaacttggcaatcctgacagtactctttcagttacaaaatttgggatttgtgcaaaaatgatactttaaattagtaatcgcgataacttatgtctataatataacatatgttatcgcgataatcaatggaactgttgatactttttgttacttcttgtaggaatcgactttttcgtcaatttgttataaatttgtcatgttttttgtgtatattcactatttaggtgtaaaatcataggcatagcactgtgtgatttccttactctcctgaatgaactggttcaccagctccggaatctcatcctggctgatgccgtgctcctggacaaacttaaaatatcccagaaacagggtacatatgatatggttcagctttttagcattttcctcagaaatctttccctctgccaccagaagcttacatatataatagtccctctggtaatagctgggtatctcaagcatctccttgatgaaggggcttacctgtatgatggcgtccggaaacatctcataatattccttcagggcctctcccaggtcccggtttatattccggtaaaaaacagcttcaaaggcctggggcttcttaaatgcctctttggcataggagcgccatataccgaaatgcacatcccagatatcattccactccttttcacattttgacaaatccaggatatactcgttgagcgcatccagctgggcataaaataaaagctcatccagattctgaaaataccggtacatactggcagaagaacatcccagttccgccgcgatgcgccggatgctgatggcctccactccctccttctttatgatcctgctggcctgaaccacataatccttcctgctcaaatctttaaagtaggatgttcccacattctttttcatgacttcctcacattcggttccttattatccctataatttagggattacattctctatcattgacaaatcaatggtcttgtaatcgtaggcaatcttctcgtcatacttaggcaccttcttaatggcggtccacttattgaaggcctctatggcttcctcaatcagacggatatcccctgcatcactttttccggtttcactgtataaaaggatggtcctatagggcgtctggttgggctttaagctggatgcctggggatgggtcagaagcttgtggtttgtatgaatcaaatccctggtttttaacagtacctcctcgtaagtctccaccataaccacctgctctacgttttctccccatttttctgctgcccggtcattgttggtgaccagaatacatttacctaaatcaaacattgtatcccctcctggttattattatttgctgatttctttaacatctctttaatatattacatcaaattacaaattccgtcaatttatcccgcgcaccataagcctatgctttcccaaattatatatacaaaaatgtaattcctgtaaaaggtgctgcaaagccatcgaaatccatcaattgctgttgcagcaccctgagtcaaaggcaatattcttataggtagttccgtgaatactatttactgaaatatccgtgatacagctggaaaaaattgtctgccgtacagccctcaccgccggagaactccaccacatccccgggcagcttcttaagcttcactatgtgctcctttacatacggctcatagattcccaggaacgcctttgtcttcttctcctgggccagcctgctctttctggcagccgtagcctcctcgtcataggcattgacacacttaaggatataatatcttccgccctgctccagaatcccgctgacctggtcctgctccagctcaaatgcagctctttcaaggccatccatatcctttttccattccagcgtcctgtctgtcctgctgtcctttgaatatttggctgcaatagccccaaaatccgctttctctgcctgggccagggccaaaacattctctgcctcagcccttgaatccagctcaatctgctgaatgcctatgaccttagcctccgcgtcgctgacttccagattctcgtttttggtcagctctgccaccagcttatccgcacggtagtattggcagtacaggtcgtacacctcatcctcggatacatccataaacctgcggtcctgttccgacagatttctgtaatattcctgggccagggacttaagagaatccttttcctggcttgtaagctcaattccctgttcgtccgccatcaaattggtggctgccagctcaatcaggaactgctccacctggtccatcagcttgtcctcgaatgtatcaccgttctcgtccgctttgacagaccagagctcactggtatatatattctggtaacggttgcgctccgtaatggcaatcaccatcatctgccccttggtatactccttgtccactgtcctggagccggttgtggcagctgccttccttgaacatcccgtcaaaacagccatcgccaggacggctgtcagacacaggcccacggcccttttccatctcttcccccgcaccttgtatatcctgcttctgtccactgtcacactcctctcacagcagccctttcagtatcttgaggactccgccccgcacattgctgtccgcctggaacctggcagcctttcgcacctcttccctggcattggcaactgcaaagctgtaataagcctggttgagcatctctatatcgttgagctgatcgccaaaggccatggtctcctccatcttaatgcccaggctttcctggatggtgcgtacagccttccccttgttcacatccttggccatacagtccatccacatatcaccggcgcaggccatcttagcctggtccttgaactcatcatatatgtccctggtggctgcctcgattccctccttcttataaatggaaatcttcacacacggctcctccagctccagcacatcctttacccggatgacattaaacttatagccgttggtcagccagtcgcacagggtgtcgtccttagaatccagataatccccgttcacgccggcatagaccatctccagttccggatgcatacgtactttgcgtatgatgcggtgggccagctcacgctccatcgtataggcgtacaggcatctgccatggcatcccacgtacgccccattgttggcaacatagaaaatcttcttcttaaccggttcaaacgcgctttccacactggcccacgggcgcccgctggcaaccacaaactgcattcccttttcacgaagcttcagaatgatgtcaaatacttccggatccaaatccggggatccgtccggtacaagggttccatctacatccgatactataagcttaatcatcttccctgtcctccaaaagtctttttatctcctgatagagacgtcccaccggcagtcccaccacgttggcgtagtccccgtctattccttttatataagcggcaaacctgccctgaatcccgtaagcccccgccttatccaggggttccccgcactgggcatattccttcatttccccgcaggtcatggggtacacatggacatccgtgcgctccgcaaatgtaatcccgtggcacctgtcctccccctggcacagaagcaccgtcacaccggtgtatacctggtgggtcctgccctgaatcttctccagcatctcataggccctcatgggggttcccggtttacccagtatctcatttcccacggaaaccactgtatccgccccaatcaccatggtacccccgggacatcccgacgcaacatcctctgccttctgtctggacagttccatgaccaccctatccggccttttctccctggtctcctcctccatccggctgggcctgatttcaggctccaggccaatctgtgccatcagttccttccgtctgggagacgccgaggccagcacgacctgatatcctccccaagtctgtctcatatccatgtctttctcctttattcaatccgtcacaaaacaccggcgggtcagaacgacgaaaagactgctgcatgtagaccaatggtaacagccacctgcagcagcctttcatccaattaatatatcttcagccggcccactgccggctcatcttcctcttccataccgcccatgcgcaggcggaaacagtggatgaaatccaccagataaaacatggtaagccctactgccaaaacagtccccacatggccgggcagactgatcacggcagcacgaacccttatatccagaaaataaaagaaaaacaggcccagaagtccccatgcaaggctgctttccagacagaccattcctttataattaaagggtttgtggctgtagtcccaccagaaggagccgaacagccgtaccataatattggctgtgaccagttccatggtagtggccatggccatggatgccgtgtagagctccatggggctgccggaaacaggccgcagaagcatgcatgcacccagggcaccgaaaccatatatgacgcaaaaggggccatggccaaagccacggtccactacaggccgcttatattctgcactcagcacaatacattccagcaggtaaccaagaaaactatacataaaaaaccagttgatgaaatcataaatattcatggtatcttctgtccttcctgtctaacatgataccccccgccgtattaataataggaattcagggccaaagccagtccaattcccagtatagcccctgccagaacctgcaaaggcgtgtgtcccacatactccttaagcttctcctgaagtacctccgcattgagcttaagcggattctctgaaaggatggaattcaaaagcttggcctgtttcccggtctcacgcctcactccgatagcatcatacatgacaatcatggagagcacgaaggacacggcaaactcaaaggacccggcaccgtatttgagcagggccgctgtggtcaggccgcagactgtggcggagtgggaactgggcataccgcctgaccccaccaggcgctccgcgttaaaattcttattcaaagcaaagtcaatcagagtctttaagaactgggcaaccacccatcctgtaacagcactcataagaagctgattgccaagcatctgtgtccatacattcataatcggattattctttcccctttcaaacgggctccgggacggttatagcaaatcgttggattaccgtctggccggctgtgcaaacaggcacatccgaatccagtgcttaaaccgggccgtggtttccactgtactgcaatatttatccgcacaagtaactgcatatcctgccttggatgtgggaggtataagggtcaggggccacatatgcctcagaataatcatccgttcctccccggtcagccggaaataccggtccgcgttctccagggctgcctttgggtgggtgaatccatgaaagtactggcccgtctccttagcatgggtatgccaatcgtataaaaacaaatcatggagaagccctgcccgagcagcgcttctccagtttcctcccagctgtttgcacagcttatatccaaggtatgaaacctgtatacagtgggtcttacatgtggtagtcccgtgctgtatgtactggtccatggactggaatacaggatggcacaatatatcctttacacactccatgtactcctggtcttctgttatttctgaaaccattgacggctccatatgggcatcacacctttcttagttcatcagcatattatccgacattacaggtctgttgtcaatatccaatcagccaatcataaagttcctggtatttggcggcagaggtccaccatgaataatccttggccatggccctgtcaattattttattccactcccgccgcttgctgctgtagacatactcggcataacgcacgcttcccagcatctcatgagcattgtaattcgcaaaggagaatcctgtgcccttgccctcgtattcgttataaggctccacggtatccttaaggccgcctgtctcccttacaatgggtaccgtgccgtagcgcagagccatcagctggctcaggccgcatggttcaaacagggacggcatgaggaacgcatcgctggcagcgtatatcttatgggacatggcctctgaatagtaaatctgggcagataccctgtcatgatacttccagtcatagtggcggaacatgttctcatagcgctcctcaccggttcccagaactaccagctgcaaatcgtcgctgcacagctcatccatgacgcactgaatcaggtcaaagcccttctggtccgtaaggcgggagacaatgcccaccatgaacttcttctcgtccaccggaaggcctaactcctgctggagcgccttcttgttctttatcttttccttgcggaaattcttggcattatagttctgggcaatatacgtatcagtctcaggattaaactcatcatagtcaatgccgttgacaatccccctgaggcttccagccctggaacgcataaggccgtccagtccttcgccataaaatggaagctttatctcctctgcatatgtgctgctgactgttgtgatggcatctgcaaatacgataccgccttttaacaggtttccgtccttataggcctccagcttatccggcgtgaaatagtaatccggcagctcggtaaagcgcttgatagtctttacatcccacacgccctggaacttcaggttgtggatggtgattacagacttcatattgcagaaaaactctccctcgcggaacttatccttgagaagaacaggaatcaatcctgtctgccagtcatggcagtgtaccacatcgggctggaatccaatcacaggcagcgctgataaggccgcccggcagaaaaagcagaacttctccagatcccaataccagtccccgtatggctttgcgccattaaaatagctctcattatcaataaagtaaaaggttataccctcatgtacgtactgcaggatgcccacataacggctctgtcccagataatccatatagaagtggtgtacatatttcatcttgtcgcgccactcctgtttgatgcaaaggtacttggggatgatgaccctgacatcaaaatactctttatcaaagcattttggcagggagcctactacgtctgccagtcctcctgttttaataaacggcactgcttctgaagctgcaaatagtattttcttcatcaaaacctccctctcctgacgaacaggttctatatgcctttcctaatagtataccttacttttccgaaattaggaagttgtttctgatgaatttgtcttaaatttttttgtattccaagagtattttatccgatatcagcgcaatgaattcagaattggtaggcttaccctttccggtactgattgtataaccgaaaacttcatcgatggtttccatcttgcctctgccccaggccacctcgatggcatgacgtatagctcgttccacccggctggccgttgtctggttgcgtttggctatggccggatatagaattttcgtcacactgctcatcatttcctggtcttccaccgacatggcgatggcatcccgcagatactgatatcctttaatgtgggccggtatgcccagctcatgaagcatctttgtaatgtccgtctccagatgctccttcatgtactcttccctggttatatgggattcttcccccggctcaaaaggagccgttattacttttcctgccggctgtttattgggcagttttccaatatgacgaatcttgtttaccaggatttccttgtcgaagggtttcatcagatagtaattagcgcccgccttaaaggcatcttctgtcatctgttctccacctactgcactaagtataatgaatgcaggatttttcaggaaagtatgctcgcttttcactttttccaccacggatataccgtcaattttcggcattaccaaatccagcagtacaatgtccggcgttgtgtcaacaatcatgttaatggcatcagcgccattgtctgcctttccaattacagataatccgtcttctgcgttaatcagttcatccagcgtattcagaatcagcggattgtcatcgacaatcgcaacattcagcttttccacttccttttacctcctaaaattgtttgcctgtgctgaactacctgccaaaaaatcggtagctgctattcgaccaccttaacatcaaatccatctccttcgtcaatataattcctggcgaaatttattatatatggtccccataccatatagcaacgattcgtggtcgcaattttagacacgcgtcgagattaaattgtatcatttttggtgtcattttgcaattattaattatattgattaacatttctgtaactaacaatcggttttattcctttattttacattaattcgacaccatttttgtaatttcagcacgttgatgtttcaattcattatattctcacaggcacgattatagaacgcaaacatctctatttttcctcctgatatttaaaactttggcaaaatctcaggagggggtgaggcagtatttgtcgatttttgacgagggggtggttttatggcgggggcgcagaaaaatcaggatgatacctgcggctctgtcgtccttctttatcgcctgctccatgagcaggctcccaaggcctttcttttcactatatcctgcccggactcaatgctccatcatattctcaattaaaatcccgtaccctctgctggcatcctgcacaaacacatgggtcactgccccggccagcttcccgtcctggataatcgggctgccgctcattccctgcacgattcctcctgtcagctccaacagctccggatccgtcaccttaataaccatacttttgttcttatggccggaattatagtccaccttttggatctcaatggcgtaatccttcagctcgccggaaatattgctgcggatataagccggtccctgctttacatcctggcggcaggcgatttccatgggttctcctgatatctgctttttaaactgctggttgaccgtgccgaatatgccctcatttgtgttcttttctatatctcccatatgggactgggggccgtagtaaattacgccggacagcagtcctggttttcccatggatcctttttctattcccatgatttccgtggaatacagggctccgtcggaggattccactagatcgcctgtatcgctgtcgctgattccatggcccagcgcgccgaacctgccgttcatatccacataggtaatggtgccgataccctgggtatcgtccctgacccatgctcccagcttgtactgcccgtcagcaccctggaccggcttcaggcttatatccacgtcctcgccttccctgcgcacctggagcacgcagtcctggccccctgactcgctgacagcccgtatcagatcctcctttgtgttcatgggctttccgttgaacgcttcgatatagtcacctgatttcagtattccgtatgccggttccacctccatgccgtcgcttcccgtgattcgcccggtgccgatgaccatgacgccatccgatttcagatagatgccgatgggtgagccgcagggaatggcatacctggtgtccaccacatccacctgtatgtcctttaattttataactccaaacagcttaagacctacctggtagcttcccttttctcccccgaacatggaaaaatggtccctgccgcttatggtaatctgatctgccggtatattgctctcattggacagggctacctcctggctgtcgctggatatggttgcctttaaaggcaggccaaaggaaaattcctcctcttcattttctataatgctcacccggtctggcactgcctggtccatgtaataccacgtgtaccccgtaacagccacagcggacagccagaaaatgcgccccagccaccggtaaaagattgatttccccttcatcgccctgcctccttatatagtcattcatgttaaatgggtcaatacaaagccatagttcctccatttggggatgaaccacaacaaaaaaaagaaagaagcaacgttcaatgcctctttcttagtattatccatcctcagaatttcaatctgttttattttgttctgtctgccaattccttcatttcacctgcgttcttaagcactgcctccgtaatcctggcgccgcctaacagcctggccagctcttctacggaagcctgcctgtctaacagacggatggtggttatggtcctgccctggctggcagattttgcaatttcaaaatgcgaatccgccatggccgctatctgcggcaggtgggtgatgcagatgacctggtggctccttgctatgagcatgagcttctccgataccttctgggcggttcgcccgctgataccagtatctatctcgtcaaaaatcagtgtggggatatcatcggaatccgccagcacagttttgatagccagcatgattctggaaagctctcctcctgacgccacatccttaagaggacgcatgggctgtcccggattggttgaaatcaggaactgggccccgtcccatccggatggggtaaaatgatccagtttttcaaattccatgtcaaattccacatccaggaaattcaaatccaccagaccctgcctgattttctttacaagcgtcctggatgcctttttacgtatccctgttaattgtgtgcagagtttctccaaaccattcctgcattcttctaattcctgctccatacgctttttgtgagcgtcatagtcttccagttctcccagccttttctttttttgttccaatttctggaatatagtctccacggccggcccgtattttgcctgaaggttatgtatcaggtccaggcgttcctcggttttcctgaatgtttcctcgtccatctccatagaatccagataggatgacatctctcttcccgcgtccctcagaatggaatccgcatcatagagctggtcccggacgccgcccaggctctcatcgtactctgacgcctgctccacctcttttaaagcccttgccagccaatctccctccactgcctcgtaagcggctcccagacactctgcaatgcgcctggaatgggaataacggcggtaaaccgaggtaagctcctcctcctccccttccttcagggccgatgtctctatctcctctatctcaaaccggaggaagtcagcctcccggatacggctttcagcatccaaatcaaaccccctcagcttttcttcaagggaacggtatatacggtacctgtctgcaattgtctgttttacaggctgggtcgcggccttgacataggcgtccagaatttcaagatgcttggatttgtaaagcagggactgatgctcatgctgcccgtgtatatccagcagcaggccggtaatctggctcagtctggccatggtcactgtctcatcgttgatacggctgatgctcctggcagaagtcagctttctggatatgattaccagtccgtcctctgtgggttccacatccagctccctgagagccttccgcttttcctcccctgtgacggaaaacactagctcaatataggcgtagtctgccccgggacgtatactgcctttcggtgccttgccgcccagggccatggttacggaaccgatgataatggatttgccggctccggtttcaccggtgaggatattgagaccctcaccgaattccacatccgctttctcaataagggccaggttctttacatgcagttccagtaacatattacaccccttttccgttagtcttccaccattttcttgattttctccatgacaatgatggtatcgtccacactgcgtatggcacacatgatggtatcatcacctgcaatacagcccacgatttcgtggaactggatggcgtccagggcagcagccacagccatggccatgccggatacggtcttgattaccaggatattctgagccatgtccatggacatgtatccgtccttaaggatgcggatatatttgatggcagatgtccccctggggctctccaataccatgtagcgctgtctgccgctctccgactgcatcttggtcagcttcagttcacggatatccctggaaacagttgcctgggtcacattgaaaccagcttcattcagcctttcagccagctcctcctgtgtctctatctcatattttccaattaattcgacaattttgctgtggcgctctaccttcatgtgagacgcttccctccttgttgatttataatgttctgcggaccctgctgtctatattcctccaagatggttgctgaggttctgcataaatgatatctgctttacctttatcatcactgtctgcagctcggaacaccgtatgtctatacagtcccctgcctttaattccatggacgtatccccgtcaaaggatacgacctgaccgctgttaaggaccttgatcctaaccctgtcctccggtgccagcacgatactcctggcattgagggagtgggagcagataggtgtcagcaccatcatcctggcccccggcgctatgaccggccctcccgccgaaagattataggctgtggagcctgtaggcgtggctaccaggacaccgtctgccgcgtattcattgagatactcgtcattgacatagacgctgtagcgaagcaccttcaggggatcctttctggtaatggcaatttcattgagggcgatatcctttaaaagagtctcttccctccgccatgctgtcccgtgtatcatcatccgccgttccagctggtaacgctcatttaacagggactccaggaccggcgcaatgtcttcctggcggctcacctggttgagatatcccagatggcccctgttcacccccagcatgggaatgttgcggcccgccaggtccctggcagcctgtatgagggtaccgtcccctccgattgttatgacgcactccgtatcctccggcacctgggccccgtcaatgtgggctgcccccctggttctctcaggtgtatggtgcaggaggcattctgctccctttgcctccaggtaagccttgataaacacctgggcctcctgtacatattctttgtcaagattggcaataatataaaaatgtttcatggttatggggctcctgacgtttttatacgttatttatccatttgtgcaaaccgccggccgtttaatccagacatccgtgggcctgttccacaatggcacgggctgacaattcatattctgtttggtttcgtttcgcctgatggttttctgtctgcttcatttccgcatgctctgtttttgactgattcatttcttcctgatcggttgttttctctccggttattttctgtacattatcctcctgccccccattttcctgcaaaatattctggaggtacagaagatattcgatatttccctcaggccccttgatgggagagaattccagccccagtataccaaaaccaatgctccgggcataatccataaccatctctatgacctcaagatgaacgctcttttccctgacaacgcccttctttcccaccttttcccgtccggcctcaaactggggctttatcaggcacaccacctggccttcatcggtcagaagctgttttaccggtcccagcacttttgtcagggatataaaggacacatcaatgctggcaaattcaatgcggtcccctatatcctccggggtcacgtaccggatgtttgttttctccatacagatgaccctgtcgtcattgcgcagcttccaggcaagctgtccatgtcccacgtccacggcatacaccttcaccgccccgttctggagcatacagtccgtaaatccgccggtggaagcccctacgtccatgcataccttgcctgccagctgaacgccgaagcggctcatggccttttccagcttaagccctccccggctgacatatttaagggtgtttcccctgacctcaatctgtactgtctcctcaaaggacgtgcccgccttatcttccttctgtccattgacatagactatccctgacataatcagggccttggccttttccctggactccgccaggtttctctggaccataagcacgtccaaccgctctttcttcattaccgttctccttataccgaagcggcatttccccgctgccttccggcttaaggtgcaatgccgcctgtattatctgctatctgtcaatcctttttgccgatataaccgccggccttcatggtccggataatggaatcgctgtcgattcccagtccttcccttaatatggacacattgccatgctccacatatgcgtcaggaatggcaatattaagtacctttacttccggatagttctcatgtatgaatgcagtgaccgccaggccgtaaccgccctggagcacattttcctccatggtaacaatcaggcggtgattcttcgccagacgtgataccattttcctgtcaaagggcttcacaaacctgccgttggcaaggctgcatctgtatccctccgccttcagcttctgccgcacatgttcgcctgtgctgaccatgctgcccacagcgagaagggcaatatcctcttcctcgtaaagtatttcacccacaccgtatgatatgggctgtctgaattccttcagtccccggtacgcctcgcctctgggataacggacagccagagggctgttataatccatggcaaagtccagcatggcccgcagctcccacagattcttgggggccataacgctcatgttgggaatggaggtcaggaaggaatagtcaaagattccctgatgggtctccccgtcgctacccacaagccctgcccggtccactgcaaatagcaccggcaggttctggatacagacatcgtgcaggacctggtcataggccctctgcaggaaggaggaatagaccgccaccacgggcctgagcccggccgcagccatgcctgcagcagacgtgaccgcatgagcctccgcgattcccacatcaaaaaaacggtccggaaacttctttccaaatgcagccagccccgtaccgtcaggcatggcggccgtcactgccaccaattccggatgctcctgccccagctggcagagctttctggagaacacatccgtataggatggattcttctgggatgacagggattgtcccgtttttatgtcaaagggacccactccgtgaaaataggatggattcttttccgccggacggtatcccttaccctttttcgtcatcacatggaccagaactgcgtggtccagcttctgggcctccctcagcaccttgcagagggcctggatattgtggccgtccaccgggcccagataggtaatgcccatattttcaaacagcataccgggtataaacagctgttttatgctgttcttggtgcgtttgattttatctatcatggcagtgcccaccaccggaatccggtccagggcatctgccacgctctttttcaggtcgttgtagccgctgcccgtgcgcaggccatttaagtagcgggacatgccccctacattttctgaaatggacatcttattgtcattcagcacaatgatgaaattcttcttcatcctggcggcattattcagagcttcatacgccatgccgccggtaagggccccgtctccaatgacggataccacacggtagtcctcacctctgatatcgcgccccagggcgattcccagccccgcggatatggaggtggagctgtggcccgtgtcaaaggaatcatagggactctccttgcgcttcgggaatccgctcaggcctccgtactgacgcagctcgtcaaattccgccatgcgcccgctcaatatcttatgggtataggactggtgccccacatcccatataaccttgtcctccggaagatttaaggtcttaaaaagggcgatggtcagttccaccacgcccagattggaggccagatggcctccggtatggctgattttctcaatcaggaaggtccgtatctcctgggccagtatctttaaatcctcgggcggaagggctttcagttcctccggcccattaatttgttccagtatcataataacggtatctccagtcttacttctgacggcccaccaatgcgcggattaactgctccaggaaatcattgttccccggaagcttgttcagctcttcaatggcttctatagaaatctgttccacatccttctttgccttgtccagtccttccagggttacataggtcgtctttttattcttttcatcgcttcctgaaggtttgccggtcacatcctgacttcccgtcacatccaggatatcgtcctgaatctggaatgccattccgattttggctgcaagggattccacaatcttgcagtcctcctcagcagcgccgcccaggacagcgcctatcagcatggaagcctcaatcagcgctcccgtcttcagacggtagataaattccagcttgtctcccggtatcgggcctccggccagctccacatccacggtctggcctcctatcatgccgtacacgccggtcttacgggcaagaatccctatagcccgcccaatcctggataattcgtccggatcaatgcttgtctcaaaggcattggcagctgtctcaaaggcatacatcataagggcgtccccggtaagcacaccgatgtcctcgccgtactcagcccatgtgctggccttgcccctgcgcatcatatcatcatccatacagggaagatcatcatgcaccagagaggaggtgtgtatcatctccacagccgccataaagggaatcacagcttccagaagggtgcctgtaaaaagccggcacatctcctgcatgagcatggggcgaaggcgctttcctccagccttcatgctgtaattcattgcctcgaagatagtcttctgatggcctgtttcctccggaagataagttccaattaactgttcaatctctgctgtacgcgcatcaagttcctgtttaaatgtttccttatcactcattttcatcaccctcactcaatatctgaatctgtttttctacattgtctatctgaccgctcaggtacttcaccagcttcatccccgcttcatagcaggtgaatgattcctccagcgtactgtccccggcttccagtttttttatgatttcctccagctgggcaaaattttcctcaatgctggctttattctcttccttttcctgtgtgtccgtcttcttacgcggcatcctctatccctcacttcccggcagtttcatggattccgtctccacgacccgggcgtccacacgcccgtccttaacgctgacgcgtattatatctccaggctctgcctgtgtaatggaggtgaacgccctgcctctggcgtctgtcacaaatccgaatccgccgcccagcttcttaaggggcgacaatccgtccagtctccctgataacagggccagcctgtgctttccctctgtaagtcctaaggccatacgcgcctcaaggcgccgtctcctgtcctccagcttacgccgggacaatcccagattttcttccatcatccgttccaggcggctctccatgtctgccaggcgctgcctcctgtcgttgagctgcttttccgggcttagaagctttaagcgcataccgcactggtccagccggaaatgcagcttttccagcctgcgctccatggagcgctccagcacctgcctgtacagattcacctgctccacaaactgaccataatcaaacacagccagttccgctgccgctgacggagtgggcgcccttaaatccgccacataatccgctatggtcacatccgtctcatgccccacggctgagataaccggggtggtgcagttaaagatggccctggccaccatttcctcgttaaaagcccagaggtcttcgatggaacctccgcctcttcccacaatcaggacatctaaccccatacggtccagagtctctatgccctttgcgatgctgtactttgcctgctctccctggaccagagccgggtataatatgagctggacatagggattccttctggcggatatattcatgatgtcacggatagccgctcctgtgccggccgtgacgattcccaccttcctggcatatttgggtatgggctgcttgtaacagctgtcaaacattcccatttcctccagctcattccgcagcttttcaaactggcggaacaggtctccctttccttccctggtaatctcctttgcatagagctggtatcttccgtccctctcgtacacatccacggtgcctgacaccgtaacctcctggccttccctgagctcaaaatccagccctttcctctgtcctgcaaacatgacagcagcgatctgcgcgccgccgtccttcaatgtaaaatagatatggcctgatgtgtggtacttacagttgctcacttccccccgaatggaaatccggttcagggcaaagtcctgtgtaaacatgttcctgatatatgcagttacctgagatacggtgtaaacacttgccatacgtcctgcctacgcttcgctttccttattctccggaatttcctgcggttcctgagaagcctgaatctcctgcggttcctggggaactggagtttcctggggctcctgagaagcccgaatctcctgggaagcctgaatctcctgggaagcctgcgtttcccggtgttcctgagtctccccgcaaaccttgttttcttccggcgctttggcctctgcggcagccctggctcccttgactacaaacttggccagtattccgtttacaaaggacggagaatcatttccgccgaactttttcgccagctccactgcctcattgatggataccttttcaggaatggcgtcgtcgtggagcatctcatacagggccaggcgcaggatggtcagctccacctttcccatgcgcttggtcttccacccggcggctgcctggttcagcttctcatctatctcaggaatcttctccattatgtttgctgttcttgcctgaagatattcactgtctgcctcttttaattctactttatgcaatacctgaagaatacccgactcatctacatcgtcttcttccggggactggaaatactggcccagctgggctatggcctcttcctgcgtcgggtagaagtcagccgagaacagcatcttaaagcaatgctcccgcaattctcttctggtcattttctctgcttgtactaaaaagcggtggctttccgtacattttcctttcttcgtgatgtccgcttcttccctttcctgggcatgtcctaaatagcccggagatgaagccgctttagatattatagcaaacccagtgcataaaaacaataaaaaatgtataaaacactccccaggcaacgctccggggagtgtttacagatattatattaaaccgtggttttatctgccttcatccatattgactccggcaatctttacattcacatccagcaccgtcaggcctgtcatattctcaatggccgtgcttaccttttcctgaacctgctcacttacggacgggatgctgtatccgtagcggatattgagggacaggtctaccgacacatgctcctccgtcacatccaccttgacgcccttgctcagattcttcatgcccagcttgcctaccagttcattggtaatgttgccggccatggaatccactccctccacctctgtggcagccagaccggcaataatagccactacctcatccgcaatctgtacctcgcctattttctctttctcgtataatttatgggtactgcgattttcctcagacatcacaacttacctcctgtcaagacttaattattagtattataacaaatccgcaaggatatgtataggattaatttgtgcgccctctcctgtcctttctcccgtcattctttccgtctttttctcagccacagcctttcagacagcgcatttccccgtaaaaaggcggtcaggaagcatttgatgaccgcgacagttccttctgaaacgcgttcaggtcctgtcctttcagggcccgctccagaagctccggcattttttggggattacaggcaaaacagggcacatccatggacgcaatcctgcccgctatctgctcgtcataatagggctttccgccgtccgcaatggccaggaggcagaccactgtcacaccggattccttcatctcccggatgcgccttagaagtccggcccggttgccgccttccatcaggtcgcttacgagaaagaacagggtttttcccggattctccataaactgctggcagtaggccacggatttctcaatgtccgtaccgccgcccagctggaatccaaacagcagatccacggggtcttcgcattgttcggtcaggtccgtgatctttgtgtcaaaggccacgattctggttttaaccgacgcaatgctggccagaatacagctgataaccgaggaatagatgaccgattcccccatggaaccgctctgatccacgtccaggataaccgtatatttattggcggcgttggacgtggtcctgtcataaaaataaaaatgctccggcaccagcctctttaattcagggttgtaattcttaagattcctgcgtatggtgtccttataatccagggccgccgctgacggaatgggggaatgtctccttctgtccacggcagcggtcactgcccggcggatatcatcggccagcagcctgttaatttcctccacaattctggatataaacgcccgcacctggtccttggaccgcccgggtatctggtcctttaaggccagtatcatggaagccaggttcatatccggctccaggttctccaaaagctccggctcaaacaacagctgtttcaggccgcagcgctccattgcatcggactggatgatagtcaccagctccttgtcaaacagggttctgacatcccccagccatttggaaaggacaggggcagaagggacgtttcctgcgcctctgcctcccggtacctttttgccggctccgtctccgaatccgccggagtccgtctgattatagatggacgccagggcctggtccattaaaagctgttcatctgtcagctccacaccgcccatttttccaaactggggactgctttcctccccaagtatcaggcgccatcgtttcattctggtttcaagctccatatattccacccatcctatatatcgtcaaagtcaaaaccgtccaggctgtcaagcagctccatttcctctccctttaacggcccgttcagtatctctcctgcctgggccgtattcacctgccatatttcgcccagattctcagccacatccagcttttccctggaactgaaatcagcaaacgccctgcgtaagaataccagggcccgcttaaattcctgatcatccagagtatccatataggcgctcagctcccgccataaatccagcctggcaataagcgcataccggttcttcttagacaatcctgcaaaccatcctgcccccagttccgccggaatccccctggaaagacggcggcggacctgacggcttaattcctcttcctccatccggccccgctccagcaggatggcggcagcgaaaccggatatgcccgtgttcaggtcatccctggaagctgtctccgcaagcaggcggataaaacgctcctcatccagaaagtcatggtggagacacaggctgttgagctgatccatggcctccataacgcccttttccgcctgactgccacaggtacaggaattaagaaacaccagacaggccctaagaaacatctgattcagtacaggcagcaggggtgtgctgtccagatgacgtatgttgccgaaccgcaccacagcggaaatgctctgcgctgtcccggccagctccatgaagcctgctgcctccaccgagagcccctgcagaatatccgttgcataagcaaccatctccggtataccgcagcagcatgcggcctcaatgatatccgctgcctccccaatctgctccgccttcacggcctgctccttcatggcaaaggatgccgcgccggccacagtatctcccttcagagcagactccaccaattcaatttccacttccggggtccaccggatatcccagctctccgcccaggtggcagcttcctgctgctcctttctcaggactgcgaaatgtactcccagcacacgcaggcggtgcaggaaaaatgactggcgcagctcccggtaagcggctgcctccgatttcacattcagtttttcccgcaggtccaggttcagggtaaaggcagtctctgtcttatacttttccagtttcagttccctcagctgcctgtaaaaatcgtcctgcaggcaggtacggctgactccctggggaagctcccccacagccgttcctatctccgtgtccgctatggctaatgccagttccggcagactgccgtgccccatggccgtcactgcggcgtccctcaaatcgcgcagggagggcacgctgtatcccttaaggcaggccagggacctggccagttccactgcctcaatgaccccggcagaggataccgtaaaaccatgctgcctctgatagccggatatggctgtaaggtagcggtaagttcccatgtccctgtcgccctccagcagtgcctgccacagcatcccgtagtaggcaggcgcctgattgcccgccccatagccggagcgtgtggacaaacggtaataggaataaggcatcagcgtcacattgcagggcacagaaggcagcaatcccatctgcgcatctgtcatggcaggctcctctccggccagtcccgccacatgataagcacctgtcactgccacgattcgttctgcctggaatccctccttcagtgcgtcctccagctttcttctcatatatgcttcccgcacaagtatctccggccagtcgctgtcaccgcctgctgtcagctcccgcagctgccgcccaaaggcgtccgcgccgtcccggtacgcctcatgattttctgagtgctccatgacacgttcccagaaggtctcatggccgtcctccccgttaaaccggtccaaaagcctgtacacatgctcagacgcagatccggacgtatgttccggggacgcctgcccctccccggcccgccggattcccaaaaacacatccgagggcaggtccataaaccggcactgcgccccatgttctttggcccagacaatggcctggtattccggagagtactctgcaaaggggtacaaaaccgtgcgtatcggagagtccttagtaaacgccatgactgcaaacggcggcttggtctcctccctcaccatgtcatccatcagcccgttaaaatcagaagggccttccaccagaatcagatccggctgtttttcatccagaaagcttctcaaatgataggcgccggccggcgacagatgacggataccaaaacaattcggatgtcccatctattggttcaactccttacactctttataaagtccaagccaccggctgccgcgtttcttcataacattttccaggtattccttccacgccagaccgtccttatcctcatccttgactacagcgccctgaagggcggacgccaggtcataatctgttatttccccatttccgaagctgcctgccagagccatgctgcccgctaaaagcgaaatggcctcggcagtggacaacacgcctgaggacggctttaccttctgcctgccgtccagggtcatgcctccccgcagttccctgaaaatggtgcataccttttccaccacctcgtcatggggaatcccggccctgagctccaggctacctgccagctgctccacccttgacttcacaatctccatctccgtggacatatcggacggcggcgggaggataacgatgttaaatctccgcttcagggctgcggacatctcgttgactcccttgtcccttgtgttggctgtggcaatgacggaaaatcctttctgggcaggcagttccagcgccagctccggtatggagatgcgcttttccgacaaaatggaaatcaatgcgtcctgtacctcactggcgcacctggatatctcctcaaaacgggcaatgctgcctgtctccatggcgcggtatacagggctttttatcatggcctccctggacggcccctgggctatgagcatggcgtaattccatgaatagcgtatgtgctcctccgtggtgcctgcggttccctgtatcaccttggtggaatccccgttgatggctgcggtcaggtgctctgacagccaggactttgcggttcccggctccccgatcaggagcagggccctgtccgttaccagggtggcaatggcgatttccaccagcctgcggtttccgatgtatttgggtgtgatttcctttccgccaacagttcctcccgtgatataggtgaggacggaacggggactcattctccagcccgcgggaaccgggtcctgttccgctgcaatcagcgcgtcaatttcctcctggtagagctgttccgcaggcagtcgctgcacgctctcttcttttcctgctatttttcccatgatatcctccaagtctcactttattttcccgcagatatggtccgtcagccctgtcccggcagaccggcagcctcgttgatggcctttctgcaataatcattggcatcccagcttcttctctcggagcttcctttcgggaagccgcacaagatacggtcgatctcccgaagctccgtctgacgctcctcttctgtcatgggaagctgattcatctgatgctgtacggaccacagtgatatgccggcattgggattctttttcacatatgtgcttataagtcccttgaaatccttccagccgcactgtgccagaatgccgtacagctcccggttatccgtcacggtcagagccctcttataaaaataggatcccttctcagcccttttcgctgccggcagcatggagaacaggattttgtcccggtcagtttcccgttgtctgcctgctgcgtccagtcccgcggctgtgtcatttccaaatatcctggcatccatcagcatatccatccatcgggaatccggcttctcataaagcctgcgcccgatgcggtgggctgtcccggacttttcgtccacacggcagaggatttcacactccccgtcttcccggatacagtgaatccggcccagcacagccagcacggccgttctggtcttgcgtttatcttcttttcccagcagggaatccctgggaatctttctgcaataggattcatagacaaaggcagcgggttttgtcagaaaatcagctgccagggctggtcccagccagctcctctcctgctcaccggccagctcccctgccagggaaatcagccgttcatcctggctgtaaataatggaatccaccagcatggcggggaatttcagccagaactccgggcccgccgggttcatacgggctgccctgcggtatacttcctgcatggccccggagcctttgcccggaagggccgtaagcagctggctcataagtccgtcaaactcttttttgctcatggtttccttttggttcagggtttcttctattatcccggccagccggtctgaaaccaggtcggatttggaaaagcggagataacccacgatctcccgccccctctttttaaactgctcctcccagtatgcatctgtctcttcctgctccatcatgcccagcacctgctctgtcatctccaggcatagtcccttttctgtccgtgccaaatctaacagcacgcctgtgttttccgtattaaaccggagggcatggatagcctctgccctcagttccttcttcgcccgtttaagaaggcccagataaaattcattttccgccccgccgcatatggactctatgaccctgagcctgtgtatccgcccgttatccgtggtctcccagaatccccgcttcacaagcggaacaatctgtccatccttcccagacagaaacttctctgccgcatctgctatctccgcataccggtccgaaagagccgttatgacagccgcctgcagacggtaatcctcaaaaacaaggggatgctcctccatggcctcggtgatggtcaccagccgtcctcctccggactccgtcagcgcctgctccaggggatgaacctggctgtagggcaggcacggcgcataactgcgtgatatcagctccagcggccggggccctgcctcagcccccgcctctggttcaggccgggtcagtgcatccccgctgtcctgtcctatatgataaccggcctcatatccggcctgggtacacaaaagggcctctgacagggccagggcatctaacagacagcccggacggtcctcacagtccggtgccataacgttttctgccattgtatacaatttttttatcaccggcacggcctgggccaggggccggatctgctccactgccctcctgagccggaaatcatctccaatcaggttcaccccggccactgccgctgctccaaggcgctcatggagttcatataatccctgcaattccatggtaattcctccctttcctggttctgtccgtcaatagagcaggcggaccacttcttttgccgtgatgattgaataggggtgcagacatatcctatgtctgctcctgtcataccagagaactccgaacatcacctgatttcctgccatctgcctgtcaggcaggatgtccaggcggcagacagacggcctgtcccccggcctgtccttcagttctatggtgctgttgccgcagtacattatgtattcccgctgctcccccttgacgccttctgtgccgactgtccccagcccgtcataggataccagacagccgaaccgcccgtccgacaatgtgtttttaagctcattctttgccgcctttaccagttcgggaagggatgaagaggccttatcacgggcttctgccagcagttctccggtcaccggcaggaattcctgtccctcccagcgtatcctccgtccgttctctcccggataatacaccagcatgggcaccctgagcgcttccgtcacggaatcctcttccttcacatacttgagggccttcacagggcggtaattataggtaatatcaatctcaccgctgtccaaatccagccaccagcccttgtccaccagttcccttctggccccgtcatagctgacatgaaaggacagctggagcaggcgtacgttttcctttttaagccccagctctatcagcctatccaggttccagattccgcccagctcctcatacaggacgcttgcgtcatcctccacctggccctgctccagcttttccgtcagataagcccttgacttttttatcagggcccggagaaataccaggattcttacggcctctttgtaatccccttttccatcctccttaagccgcgaaacctccagcacaagggactgcaccagtctttggggacccggaaggtagtaatcccccagctgctttgccaggtcctggtataccttcaccgatgttccgttcagggttcccagtcctgcctccaccagctccctcaccaccttctccgccaggtccagtccctccagctgtttcttaagcttctttgtcctggctgcctgattcgtctttttaggggccctgggcctgtcaccctgactctccttttttcctgccctgacatccttcttcgcccttttatccaatatatcctggggaatgtcacagatatcccaatggcggccctgtgacagctccatcatgagagccagaccatgtttgcacggaaactgcctgctggggcagctgcagcggcacaccggggcgtcattgtccgcaaaatccagggtcaccctgtaggccgaactgccgcttcccttgcaggagcccatgtaaaaggtgtcgtcctctgaccgggcatgttctgtgaaacctccgcttttgacaatttttcttgcattattgaccgcattggcattgggagccatggcggcaatctgctgttccgggatttccctcataatatcctccatcctgtacacgaactgcggtacaactatgtgattggttatttattccattatacggaaatttggagggggttgcaatggaaagtggggcaaagcgtaaaaaggctgccgcctttccggtctttcaaccgttaaagcggcagcccggccttctgtgttccttctgcctattctgccatattgagcagtgtaatgataatctggtctgctcccacctctgccttgcgtttcacaatatcctcaatctgggcccgctggggatccgttatggaaggagcgttgataaccacatccaccttatccttggtgatgctgacaaccggatctgagaagccttttgccatcaggagggtttctgcggcattttccttctcggaaacctcggtcaggtcaatcatgtcctggatggcctgctgtttggctgcttcgtcaatgctgtcactgttaatcaggctcatcagtgtctctttgttcttggcgcgcacctgctccctgctgagctgcacgtttgctatgtaatcagccacgttcatgccgctggtcagtacggcttccccgggattctccaggccggcctgggcggagctgtccgtatcagccgctgccatctgccccggatcagctgcctgggtagcctcctcaactcctgtgccgtctccggcctgggccagctgtccctggtcagccccggtatcggctgccgcctgggcgccgtctgcgtcgcttaccgcatccaggtcagaagggtcctggtccaggctgggaatctcctgtagtccggcctggccgtttaaggaggctgcctggttctccgccaggatatcttcatccgaaatgtccatggcgcctgcctcatacacccggttgccgcttgccaaatccttcttccccgcgtagttcagatatccggctgccgcaatcatgacagccagtgtcgtgatgatgatttggttcctgcggaagagacgtttcatgttcatgtccttcatgtgctcttttacctgtttcatattcttgattttcatatcctgcactcctttatttattccaccctctttaatacttttattttatgtgccggcaggccaaataatgcttccatagcctcagaaatttcagcttttacagttgggctgcctccgccctctgcgctgatgatgattcccgatatctccggactcagttctttttcaacaatgggcgcgtttgtactgctgccggaaccgcttcctgccagtatggtattctcctgtatctggttgtttgtcacatccctggtgcctccccctgaatccttttcctgggtggtactggtattcgtggagcgatccacccgcagcaccttttcgctggaggatttaagcaccaccatgacatccaccttccccacgccgtccacggactttaatatattcctgattctgttttccatctgtgcttcataggatccgtcctcggatgtgcgggccgccgccgggtaggaatcttcccggccgtctgatgcgcctgccccatttccgtccggcccctgggccatcccgttttgggaggagccctggccaaagccgctgtcctctccgctgccgtttgtattgtcctttgtccacagcggaaccgcccctgcgccctctgtgccggcccccgcgatctgcccgccggcattcttatccttcttgcttcctccgggcaggggaaaggagagaatcatgagaagaactcctataagaagcaataacagccacttttccttagtcatttttccattgaatctggatatccgattcttccagcccatagtactgcgccacctttcctgttaaatggtttatttttttgtccgccgccatgcctcctgcctccccctccccctgttccggtgtgtccccgttattctccacgcctccggtctccggcagctctcccagctccacatcctcaaccttcacactgtcaatcctccccgcgtccacattcacaggcctgctccccatataatcccagctgccctgctctgtatccgccttcttcccgctgatgaccagaccgattccttcaatctgcccataacggctgctgtttctgtcaccgtcaatctgtacgctggctccggtgcattccagtccctccgccctggccatggcctccacatccgctgccactgcctgctcatattcacggatgacctggtccagacgccgttcttccatcccccaaagatcctgcttcaaatcatccgtatcattctgaaaagaaatggatttaaacatggacgatatctgctcatccaggtgcagccctcctgtaaatgggctcactaccagaagaatcaggaccatgcccgaaaaaaagcggatatatttgccgtatttggaatccgccagaagattatttaccacagaaagaaaaatcatgtagtatatgatgttcttcacccatccatagacagcttccataggcatctccttttatttaacacaatagattccgggatttttcagtctgctttgctaggaggcaaaataatttacattggtggtggcgcatgtaatggctatggctaccataaacagaaacatggagtaaagcacaatctgcagcagcagcttatgtcctttggacacgcccgacacacaggacaccacccgtttgtcacacacaggctgcatcacggcagccacgcactggtacatgatcatgaggactatcagcttcatcaccggaacaacggatatgacagccaataccaccacggccgcggctcccattgtattcttaatcagcacccctgagcccagaaccatctgggccatggccccggccccctggcccagccccggaatcatttccataagccgtttcattcctgcctggcctgccgcgtcagcatagggaagtatcatggcctgtatgagatgaaatcccaccaccagcccggtcagggtccgcaggctccacaccacggcctgctccagcagttcagtcagctttgataaaagcgcctcctttgccacatggcttcccaataccatgagcacataaatcctgaccatggatatgaggactgtgctgcacagccattgtaccccggtcactgcgcccagcatacactcatacagcgccagggcgctcatgctgcccccggaaaacgccaccgccatatagtaggccggcatgagcagcttcatgaattccagtatctgttccatcacctgggccgccacctgcagactggcggaaaagctggctgccagacatgtaaacagcaggagatatgtaacgaaaaaacctgtgtcggaaatctggcctcccttaaatacggaagaaacattggtaaatacagctccaatcagaccaatggcagccacctgaaacagcatctggctccccctgtccacctgcgagaacagagcgttcttaagccccattccggtctggcccaggatgccctttaagtttcctttcatcagctccttcatcagcccccagaaggaaagtccttccattcccccgtcctgctgtcccatgacatcatccagaaactgctgaagcccctccatttcatcctgaagtcccatgtcctgcaaagcctggtccgcccctgtctctgccccctgcgccccgcttgcgtcccatccccggcctggggcctgttccccgccaatgcctgtcccctgtccccccgccgaagcgccgtaaacaggtccgcctgcccatcccaggactccggcaaacagcactgccaggccccacagggccgcgctcctgactccccatttcttccatctcttcatcccaaaaatgtctccaatgtcccaaaaagcgccagcagaatgggcatactgatacccagaatggacagcttcccgaatatttcaatctggtttcccagggaaccgtaccctgcgtccttgcagattccggatgcaaattcggccacataggtaatgcccaccattttaagcagggtcaccagatacacgctgtttaccttgatatagccttgaatccgttccagggcctccagtatatccttcagctttccggtaccgtaaaagaagataaaggcgcctgccgccatgaccatatatgctgcgtattctccctttaatccctttaactgcaccgccagcaggaccgtggcaatccccgcagccgcaatggtaataattgtcatatggtttcctccctgaaaaggcgcgttttacagcgcaaacagattcttcattgtctcaaacaggtcgtatatgtaaggtatcatccagaataaaaccagcaccagcccggccagactcgtaagaaaagcctgttcatcccggccgctgtgctttaatacctggcagatgacagataccaggattcctactgccgctatgcgaaatatcagatttacacccattgccgtctcctcaatcttcttaaaatatatttataaatgtgtcctgtgccccacagtcacatcaccatcgtgaagcatatgcccctgacttgtcttaaaacattacaatcacaagaaacatcccgcccatgattcccaggcttgtgtacagcctgcatttctccctctggttctgcctcagataatcaatcgtcaaatccagctgttccagatacagcttcagggtccgttcctgcatgtccacatccagataccccagatgctcccccagatgggccagctgttccaaatcctcctgttccaggggaatggggcccgaatccgtattcaggttcatcacctggcgtttccatatctcctgaagggattctccctcctgcatataaattccctctgccgcggcctcaaacaggccccccagaggtcccggctcccgtttccccacccgctccagggcttccgccagcggcgcccggctgtatgtaatctcgccttttaagaaatatatcatctgcctcagggtttccagcatcctcagccgccctttccactgcatggcagaccagattcccagtccgccagcggaaaacagcaccagaactgcccctgtccatttaaatgccgccaccttccgactcctttccgcttccatctgcatacaggacatttcccctgccgtcccatatagacgccacatggcctgccgtttcccggcagtccagaagaatcatccgctcaaaggcgccctgttgtatcagctctcccacagccggcttctgcatgatatcctccagcgaactgccgtggatggtggctgccagagaacagccgcagtttctcacatattcaatggcctgcacgtcctccctgctcccaatctcatccaccgctatgacctggggcgccatggacctcaccaacatcatcatgccctggcttttgggacagcagtccagcacatcggttctcatgcccagatcattctgtggcactccctggtagcaggctcctaactcagaccgctcatccaccactcccacggacacccccggtatccttctgccggatcgctgggtcctgggtccgtccgagacctgacggatcatgtcccgcagcagggtggtcttgccgcacctgggcggcgatatcaccaatgtattcaggaaacggccatcgtctgaatacagataatccatcacctggttggcgcagccctgaatctgatgggctacccgtatattgatgaaggagatggatttcataagccgtatatcctgtccaaaagccatggtcctgccagccacaccaatccggtgcccgccctgtatggtgatgaatccctgacgcagctcttcttccgctgcatagacggaaaagctgcacatatattccacggtctccttcatctgagcctggctgaccgttacgattccggccctggcccagtaccgctcctgctcctggcagcggccgcttccccggatatcccttaccggcggatcgggaacccccaccgccaggcttccatctgttttaaccgcatattcccggccgccgcagataagcagcagcggcttctgggtcctcatccgtatctcctgtaccctgtcgaaatccacagtaacctgtccaagtactgcacgcagatcccttgggaatatttttaagacttcttccctgccagccataatcttcaccccttttacctcaatatatgaaacgtgtccaaaaatatgactggagccgaaaaaaaggcagcaccggcccggcgggggctgtgctgccaattctgattcatctgtgtctgttttatctgtcttatctgtttccttctatctatcttcttctctttaccttcttaacaatctggcccgtaggcctcctgtcaatcttgtatacaatctgcataaaccgggccacctcgtcccaggcttcccggctctcaggaaccaggtccatgctcatctggaacacatgaaacatcccctcatacacggacacccggcgctttactccggccctccgggcattctgggccacctccagcgtatcgcttaaaagcatctcatggccgccagcctgaagaagcatgggcggcaggcccctgaaatccccgaatacaggcgacatataaggatccctgggatcagcgccgctgatgtatgaggaattgtaaagcatactctcccgtgaattgccaaagagaggatcattttcaaaattaaattcataactgtcaccgctgcatgtcaaatcggcccagggggacatgagcaccagcccggcgggctgaggcatcccatggtccctgaggtaaagacacagggccagggccaggccgcctcctgcggaatcaccggcaaccaccacctggcccggcctgtagtgtttttccttaaccagccactggtaggcgtgaataacatcctccagggccgccggatacgggtgttccggcgccaccctgtaatccacggtcagcacatccccgccgtagctgagacggctgtagcgcacggaaaacttacggtaaatattcttcatggggcctatatatccgcctccgtggagctgaagcaccaccctgccggtgaccactccctccggcttaagatattccattttaaagggttccctgtcaataatttcatactcgtagccagatgggcatacccaggccggttccacgggatttttcctgaattcccctgtctggatgggttttcccagggacgtttccatgatgtcgtgaatcatatcccgcaccagcgccccccgtatactcacatttttattacgcatgcttatctgtatcctctctgtaaatgcagggtccctccgttatcacagatgaaaccgtctgatgagttcgttcttaaaccttctgtcccccaggaatatggtcaaagccaggattcccacggtcagtattactgttataattgccatggcagggtgggtgaccagccctgcggcccacaaaatcagcgggataaagctgaaaaccgtaatggcgatctggtacatgaaatagctctgccagttcaaacggttcacaacaatgaggaacaccacggccgcgtccgcaaacagtatggttcccggcacagcatagttgacggaccagccttcaaatcccaggacccggtctatcatcacaagcagaatctgcatgccaatggtttctatcagcagtgattttcccagattggcatggcgcaggatggaataccggagggtcaggcccacataggcgatacccggtatggcaatgccggaccaccagagcccgtcataggtaacaatattcaccaggcccagaaacagtgccaccacagccaatacaccgtagcatacaagtaccagttttttccatatgctctcgtcatgctgaatcaccggataattccccttatccgcctccggcatgataacgccgttgctctccagctccaccggaatgccgtccgccctcaggcggccgaaaaaacattcctccagcctggaatcctggaataccttggtgaaggtgatgacggtcctgtggccgaaggaacacacgccgcatttggccggctggcgctttgacaccccaatcagcatgcggaacccttcaatgtcatcctggtactcccggtccatggagataagaccgatattggataaggtaatggtatgggccctgtcattgcgccggaagatgaagcccagagccagccacttgacaaacagcggaaggatgcggacataccatttcttctcatttgagacattgtaggaaatggtctcctccagtttttccttcactatcttctcgtccatctgcctgcataccgatgcgagaatttcctcaaattcatccctgccctgtcccggttcatggtcaatggctgtcaccgcgaaaaagttggaggctgtgtcggatccgaaaaaagccctcaggttaatgggaaggttcacaccgatatggcgtcccttccggccttcctcctcatatactctggaaatggaccagatcaggcaggcggtcaggtactttgtgatactgacccccattttacggcttaccgccttaagctcccctgtgtccgcgtacccgtggaccacactctcccctccaaagggaatatatctcccagtaaggcgcagcgccggccgggagctgtagcgtctggtctgcattttccggtaattcttaaggtagctgtcctctgtctgggtggacacgccttctcccggccccgcgccggtcctgcgccctccccgctttaattccaggtatcccgcggtcagttctttcaggaaattcacggcccccatgccgtccgtcaccgcatgaaatacctccagattgattctggttccataatagcttacccggaacaggtagagctggttgctcttggggtcgatatagcggcagggccagcttccctcctgctccacaaagggctggcgtttgttctcctcgaagtaataccagaaaaaacctctcttaagcttcaccttgaacccggcaaaccagggcagtacctcttccagcgcctgtcccagcagtccggggtctatctcttctttcaatgttacggaaatacggaatacattgctcaggttttcattggctatcatgggaaatatcttacctgtgttatccagcctgtgccaccgttttccctggggattctttttcatagcgcccctttctgccggccgtcccgcagatttcctgccggtccggcgcaaactgtattttctgccattatatctctatcatcctgcattcacaactatattatacttaatttttgtctgccccattgtttttgccgctgttttagccattatttttgcccccccatgccttcttttggcgtcttttgtttttactccggatatgatatattggacccatacgcccggacaatggcgggctgctttcaaattccgcaggaaatatcatgattcctcctttatttcacctaaaataggggtataacaacaagaggaggtatccctatgaaaaccatacatacacatgccctggagctttcaggaagcagctatgaggccggccgcctgctgggcagccgtctggcatctgttcccagtcttaagaagcgcctctcaggcggtttccccggcttcggcctgacgcagtttaaccaggccagccaatgttttagccgctggtgtcccgggcttaacgaagagctggccggatttgccgatgccctgggctgcgcccctgagcaggttctctattacggcatgacctggcttacaccgcgctgcagccacctggcccttctgccctccatgactgcctccggtcatcccatgactgccaggaattatgagtttaacgatgaggcagaggattttaccatcataaaaacctgcatcaagggaaaatatacgcatataggaaccagtgtgctgggaatcggccgtgacgacggcatcaatgaaatgggcctgaccgttacactgagctccagcggttttcctgttggtcccctgcctgagatgcgcaggcccgcggtcaccggtctgcagttctgggccgtggtccgtaccctgctggaaaactgtcgcgatgtaaaggaggcattgtccatgctgaaagacatgcctgtggcatacaacctgaacctgattgtgttggacagggaaggccgctgcgccctggtggaaaccctggacgggcgtatggcagtgaagaccattgacagtgactccgtggaacaggccctctatgccaccaaccatcctgtgctggaggaactgattccctatgaacccaaagcattcgtccactccatccgccggtatgataacatcaccgccttcctggagcggcacaagaagggcatcactgccgggcagctgaaggatttctttctgactccttatccggagggcctgtcatgcagttactacagccaatttttcggcaccacaaaaaccatggtcctggaccctgtccggggcagtctttccctgtgctggggaggacggcctgaaaacggctggcatgactttaacttctcggatccatttccccaggaaaccgctgccatcgaaatccataaccagacagcggacccatccatctttgcatacaggagcctcgtatgaactacaacaatgccatagaaaaaaccatcctgtttatagaaagccacctgaccgcatccttcaccgtggaggatgcggccagggaggcgggatattcttattaccatttaaaccggcagttctccgccgtcctcggggagagcgtcggcagctatataaaaaaacggcgtctgtcccacgcggccagggagctcatctacacggagagacgcatcatcgacattgcgctggaccatggttttgaatccagcgaagccttcagcagggccttcaaggccgtctaccacacaagtccggccggctaccgcaaaaacaggctggatgtcatcataagccagaaaccaaaagcggaccagcacctgctggcccacctgacacaatccttgacggtccgcccccgtattgtggagattcccgatatcctcaccgccggcctgcgggatcgcaccaccctgcgaaacaaccggattccccagctgtggacccgttttcttgacctcatgccccagattcccgatcagatcccccgcggccgcggctttggcatatgtgaatcctgcggtgagggaaacaccctgtacaccatgaacgatgatttgctgttctccgaggtggtgtccgtggaagtcagctccatgtcggtccttcctcctcccctggtgtataaaaccattcccggcggaaagtatgctgtgttcactcatacaggctccctaaaaagcctgccactgacctatcagtatatctggggcacctggtccctgaccgcccaggagaagttggacggcagggaggattttgagctgtacgatgagcggttcctgggatttaatcatcctgacagccggattgacatttacattccggtccgataacccataccagtccgataacccatacagggaatcatctgtatgggcactcttacttttcttcccccctgatgattcgtttcatacgtgccagatcatccatggtcaaaaggccattgtccatgtattcctcatacaccacctgcgtggcctccacaaaggcctgccgctcctccctggaaagggtgtaaatttctgcgttggcccggatattttccattgcctgcacttcattttcatcaatgagacggttattttccttcatcatctcttccgtacattctgccagaatctcctgatactccgggggcagcgactcgtaccacctggtatttacatagaagggttccgggtggaactggtaattcacttctgtaaaatacttctggacctcataaaaccgcataccagaggaattgacccacggattttcctgaccgtcaatggcgcctgacttcagggccatatacaggtcgttgtagggaacaatcatgacctcggctcccagggcctccaatgttttattgatggtgtccatgccgttggagcgcatcttaagcccttttaaatcctccggcctgcggatcatccgcacgctgttggaaaactgccggaatccgcccgcatcgccgattcccaatatggtggctccgcttttcagggaatccatgcttatttccctggcaaattcggagtttaccagccgttctgcctgggttctgtcttcgcagagaaagggaagggaaaacacaagcatcctgggaactatctccagctgtcccccgcgaaatccctgtatggtgccgtcgcagacctgttccagcatggatgcctcgctgcccagctgaccggccgggtagatatccacctggattccgccgtctgttttctcttccagcagcttcttaaacagcaggaaggactggtggcgcgggttgtccacaggctgggaatggccaatctgcatggaatatatcttttcaggttttttttccaaaccctccttcccctgtccgccttcttttattactgcatttggaccctggcctgcatccagccccagacgcgcatccgcgccccggcctgcggcggatgccatctcctctccccctctgtcaaaaccgctgcagcctcccagcaccagcaccatcagagccgctgtcagaatccctgccctgtatattgttctcattccccgtcattctcctctctgatgccttccgcctgctcatagcggaactttaacggagacataccttccattttcttaaatgtccatgtgaagtaattcggctccgaatatcccaccataccgcttatctgcttgatgctgtaggtctcgtttctcagcagttcctttgccttcttcatccggatctgaatcaggtaatccaccaccgtggttcccatatactgcttgaaaaggcggtttacatagtatttgctgaacccggcctccgaggcaatggtatccagggtcaggcgtttctggtaatgttcctgtatgaaggaacagatgccctccacctccctgggcatgtccctgtcctgttccgcgccctcctccccgcaccgggtccgggccaccatgtcccccacccgctcccgggctttctcatagctttcttctatctggctgacatccacaaagggggttccgcttcccatcataaaggcaatctgctgctgttttaaaatcgaagccaggaattcttccatcctcctgaaaatccccggaagcacatccggctcacggcagaaaacaacagccgtaaccatgtggtttgtctcgctgaacatgacggtcaggtccagataatcaaactccttcctgacagcctgaaacagcttctgcctggcgcatttatccagggagccctggaggcggatgcagaaacagtttccgctgcactcagttctgatgtttttcaaatccagatagtagagcacctcctccggcatattgcccagaaccatatcatgaaccatcttgctctccatcatatccagggtctttaacagctttgtttcacggtactccttctccgcctccgcgtccagctcgtcaatggcccgcatgattacattgataaacgcctcctttttcacaggctttaccataaaatccactgccccaaggcgcagtgcctccactgcatactcaaaatagtcataagcagtggaaaaaacggcccggaacctgtaatcctggctctttattttttccagagcctggaggccgttcaggccgggcatgttgatgtccagcacaatgatatccggcctgtcgagcatcacccgcttgataacctctgttcccgaagcacattctataacctggtctatatccagggaggattcattgataaagaagcgcagtgcctcccgctccagttcctcgtcatctgcaatcaatattttatacatcttcttctcccctgtgcaggtaaatactgacaatggtgcctgcaccttttttgctcatgattttaagactgtcatccctgcctgtatataaggaaagcctctgccatatattccatactccaatccgttccggctgcttctccgaaagacgcctcctgatcctctccaggcgttccttttctatccccattccattgtcgcaaatccgtatccgtatataattccccgtctttctgacatccagaataagggttcccccttcttccttgggctccaggccatggattaccgcattttccacaaggggctgcagggtaaacctgggaagcgtcacagcctgttccagcttcctgtcatgcctgacatccacgttcagcctggatgaaaaacgcatcttctggatcttcaggtattcctctgtaattcccagctcctctcccaaaagggccggcatctgagcgtccgccaggttatagcgcagcagcactgacaatgaatccagcatggtcagcgcctgttcccggcgccccagcatgacggtcctgttgatgctgtttaaggtattaaagagaaaatggggattaatctggctttgcagcgcaaggaaacgggcctggctcagcagcttttcatactcctcatttttgcgctgttccaccagaagctgcttttcgctctctattttttccttcaggctgaaggccatatggttaaatgcccgcgagagcatgctcactgtattttccccggagctctccttaacatgcgcgtccagatttcccctgcctatctcctccacctgttttttaagctcatttaagggccgcgtcaccctcacgaatatatagctggctgacgccgcaatgaggacacaggcagctgccacggctcccatgttgaatgcggtcatcaccttccgtctgtaggtcagctcccggttgctgtccacactggactccagcgcatactggagcagttcattggtgtatttctccagatatccgccgatggtctggctgtagtaaaaactgtcataatacctgtaatcgctgccgttgtacagaaaggaggcattgcagcattcactgtagtatgactcaaaggactggtcaattccccgcagaagataccaggattcctcattggtgctctctgtatacaggatatctataacagacctggctttttcataggtatcattaaactcagccagggtggtgcggtttcccgtcttcatgtactcctcaaacaggatgccgctctggagaaaatggtttttcagctccagaatggagtagtactggtcgatttccttttgatatctggcattaaactggttaaacagggagtggttgtaaatggaaaatgagagaaacagtatcagcatcagaagcagcaccgcattgatttgggcgcccactgaaaaacagaactgtttccaccagaatgttagtttcttcatctgaacactccttcgctgaagctgacctccggttcttccgtaagcgtttccacccaaacctgatggaattgctccatgctctgcttctggtattggtacgtgctctgcgcgcacttttccacggcctccctgtcctccttggagagcgaggtcagattttccgtgttaatgatcatcacatccggaaggcaccacgcatcatttttggtgacaaaatgaatatactggtcgtagttattgcatataaattcagaaaatgaggactcagccccgtcgatattgcctgatatcagcgatttgtatgtgttggtattgacggagcctgccagctcgattcccatatcccggaaaatctccgccatcagagcggactcgctgctctcaatcttcttgccctccaaatcctttttatccaggaacgttgcgtctgtgccgtagaagcaccgaaaatcggggtaataccagaccaggggcgtgatgcggtccatctggcattcgtccctcagagtttcctcattgctgtgtatccactctgtctgtgcgtctccgcctgcaaagttggaagggacaaagtattttcggatggattccacctcctccgacagctccaggacattgacgcgggccatggcaataccgccgaactttacctgttcaatgatttccgtgggggttcccaggcttccgttatagtaaatcttgaccgttaccctgccctgggtttcacggctcaccatttccgcaaaatacgccatggcctgggcggagggatgattctccggcatggtctccgccagcctcaggattacggcctggctccggggaagggacggactctccggtccgccgtcaaaaacgcagccggtaagaaggacggatgccgccataagaaccgctgccagggcctttgtcagggctgctgatgtctgcgcggggatacgtggatgcatattcaaagtcacgtgagaccttcctttcaggaaaataaattttgcggacattgtatcataactccctcctttccacaacaccaaataccctcaaccgaagctgagggatattggatgccatatgattttattttacaagccccagtacattagggatggtcatggaaatggccggtacataggtcaccagtaacagtatggccgctgtcactgcaaaatatggaagaagtgtcttaaatacttcttcaattttcacatttgccaccttgcagcctgtaaacagaataggtcctaccggcggcgtgattgtaccgatgcacaggttgaatacaatcatgattccgaaatggatggggtgcatgccaaagctggtacaaatcggaaggaagatgggtgtaaatataaggattgccggggtcgggtccatgaaggttcccaccaccagaagcagcaggttcataatcagaagaatggcaatcttgctgttggtaagtcccaaaagtacatccgcaataatggcaggtatattggtaaagctcataatccagctcatgatggacgatacgccaatcatgaatattacaatggcagtcatctttacgctgtctaacagaatctttcttaaatcccttatcttaatgctgcggtagataaagctcagcagcagggaatatacaaccgcgatagcggaaccttctgtggccgtaaaagcccctattaaaataccgccaataacaatcacgatcaaaagcaggctgggtatggccgcccatacggttttcaacacaatggccagggtgatttcatcccggtttctgtatccgcgtttggatgccataatacccgcaatcaccattactccgattccccataaaaggcctggtagatatcccgccataaacagcgcggagattgacacgctgcccgcaaccgtggagtacacaatcagggtattgctgggaggaatcagcattcctgtgggtgcggatgcaatattgacagccgccatataatcttttgaatagccctctttttcctccagcggtccgatggttccgcctatagccgcggctgccgccacgccggaaccgctgatggctccgaacagcatgttggccaccacattggtctctgccagggctcccggcatcctgccgcttaagatttttgcgcagttaaccagccgtatggcgataccgccgttattcatgatattccccgccagtatgaaaaagggtattgccagcagcgagaaggaattgacgcctgtaaataccttctgtgccgctgttcccatggcattctcaaagggaagcacgcacagcatggcgatggtggaggccagaccgatgctgatactgatgggaattcccaaaaccagcatggtcagcacgcagaccagcataaccagtgctacaagtattgcctgatccataattctatctcctttgttcttagatttctctcagtttttttgccagcttcatctcattgtagacaaaatagaagaggatgaaacatgcgcttacaggcactgccgaatagataattcccatgggaatctgaagcgccgcgtccatctgaatcatttggcttgtaacctgcttatagccgccgaatatcatgacgcctgctgcgaataaggcaaccatcagttcacccagcatttcaacaaccactcttgtctttggaggcatatggtcacggacaaagccgatattcatatgctcccgcagcccaaacacataggccgaaccatacataaccatccagacaaacatatacttggaaagtgattccgtatatgcgttgggactgttaaagaagtatctcacaacaacctggaaggttaccaggattgtcatgacagccaatagtaccacacatacccattcgataatcctgtccaggattctctttgctgattccatgaatcatgaccccgctttctgctaatccctgttagttggcaaggctgcgaatttcttcgtataatgcctttgcgccctcgctcttcattgtcacattgtcgataacaggctggcatgcttcctggaacggagcgatatccacatcaataaactgggcgccagcttcctctgctgtcttttttgcaccctcaaggttttcatcccacagctggaattcacgctctgtgtattccttgcagagatcctttaaggtctgctggtcctcttcgctcatcccctttaaggtggctgtattcataaccaggagatccggaatcatcagatgacgtgtgtaggaaaagtaaggagccacttcatagtgttttaaatctgcataggtaatctcattattttcgccgccgttgattacaccctgctgaatcgcggtataaacctctccctgggccataggtgttcccactccgcccattgcatccagcatagcgatacaggtctgggattccataacgcggatcttgtagccctttaaatcagccggggtctgaaccggcttgtctgtatagatgcagcgcgctcctgctgtaaatgccgccataacgctgaaattgttggcttctgtacttgcaaagatatcgtccagggctccgctggtaaatacctttttctgatgctccacactgtcataggcgtaaggaaggcccaacacggcaaaatcaggatttacattttccacaatggagtttgccaccatggccatctggatggtaccgctctgtaccagctcaaaggcatccttctgtgagcccagaagctcgttggggctgatttcaattctatatgcgccgccggttgcctcatagaaagcatcgctcatctcggacagcgccagatactggggatgcttctccgactggttaaaagccagctttaatgtagttgtctttacgtccttttcaggtgccttggcctcgcctgccttggtctctccgcctgcggccggtgctgctgtggttgcggacgcggacgcgcctcccccgcatgcagtcaatgacaacgcggttaccccggccaataccaatgttaatgcctttttcatcataatctttctcctgttctccccgttgggattcttaacgttttctttacaggaagattataaacttttccgctttaaattgaactacaaaaaatgggccatgtcctataagaaataagacatggccgcaagatattgatagtgtggatgggcaatattttatagttttaaagccaggataaatgcagcctgtttctttaaacaaacatacttctcctgttatttatgatacggctcccccgaaataatcctgtaactcctgtaaacctgttccaacagcaccacccgcatcagctgatgcggaaatgtcatcttagaaaagctcagggcaaagtccgcccgcttcataacgtccccggacaatcccagcgaaccgcctatgacaaacacaatatggcctaccccatccactcccagcctctgaatcctgcctgccagctcctcgctggtcagcatcttcccctcaatggccagggcaatgacgtaagccccatctttaatattagaaaggatgcgctgtccttccttttccttaatctgccgctcaatggcctcgccggccccgtccggcgtcttttcatccgctacctggatgatatccagtttacagtagcggctcaggcgcttggcatactccctgatggcatcctcaaaatatcgttccttaatctttccaaccgttacaagggtaatcttcatctgctaaaactccagtatcatatcgtaccacacagccccgccgtgaacggatttggaaatgcccatattcacatatccaaaggtttcataatacccaatcagccgttctttacaggtaagaataagtcccctgcgcccctggctcctggcccgttcaatcatggccttcatcagacgggaagccaccccacggtgccggtattcctcaatcacatccaggccgaatatactctggtaggcgccctgcggctcatggagtgaagtatcctcaaacatctcgtccccaatggtcctctcatttgtgacagcgccattgataaacccgatgattcggtttccatcctcagccaccaaaaaactctgaggaaatacatccagacgctccttcaaactttttctgtctgctgcctccgctgccggaaagcaggctgcctccacctgcaccactgcgtccaaatcagccggtaccgctgtccttatggtaataccatccatcttctgtcctcttttcgtatcctttgctgttcttaagcctttaccctgaaatagtatcccacgccccacttcgtatgtacataccttgggtcgctgggactgggttcgattttctcgcgcagcctcctcacatggacatccacggtacgcacatccccgctgtccatggccttatttccccatacataggtcagaagcgcttccctgctgtataccttgttgggattgcgtaccagaagctccagaaggtcaaattccttggctgtgagattgatttcccgctcgccgataaataccctgcggctctctgtatccatcttaaggtcccctgcgccaatcacgccggattccgcctcctcccgcttctgacgtttgctcttcccgcttcttcgtatgatggccttgattctggccttgacctccagtatgttgaagggcttgctgatataatcatcggcgccgtactccagccccagaatcttatccatgtcgccgcccttggccgtcagcataatgatgggcatatccgaaaactcacgtatggcctggcacacctcataaccgtcatacttgggcagcatcacatccagaagcacaatatcatattctgtctttttggccagttcaatggcctcctcgccgtcatatgcacagtccacttccatcccgtcctgttccagactgaagcggattccttttacaattaatttctcatcgtcaaccactaatactcttgccatgttccattccccttatctattattaaacggcggcccgataaccaaggccgcctgccgttatttacactgtaatactgtccttaatcttttcaaacgcagcattcttgataccggatacattcataatatcctcaatggacttaaatccgccaaactcctggcggtaatggataatgtcatctgccctggacgctccgattcccctgagggtcatcagttcttccctggaagccgtgttaagattcaccctggccttagaaccgccttcgccgctccctgtcctgccggacgtctgaacgcctgctgttcctccgcccatggatatacctgactgggtcagcccacgggccttccactcctctgcctgttcgcggtccggcacctgtatcttcatgccgtcctctaacacctgggccagattcagataatccggcactgctgcttctgagaatcctcccgccgcctcaatggcctcatatacccggctgcctgcaggaagtccatatacgcccggcgtactcaccaggccgcatacatgaatatataccagaggcatatcttccccggacaatgtatcctcccggggcagcgtatcttccccggaccggctgcctttctggggcagcatgccatcctgtcccggcgtaccttcctgtccccgcatgccatcctgtcccggcacactgtcctgtacacgcagatgctctccatccgcgtccccggacatggccccggccccgccttccggttcgtcccggtaccgcgggccttcaatccccccacgttcctcaacagcgaaaccactgtcagactccaatgccataaccatattttccggtctgatatcccggttcttcacactgcagctatagcatatgcctgcagccaacatacatatgacaatcactgccagttttattactttgaaagatgtaagtttcatcttgggcggtatccctccttccagagagcaccgtcccagcctgatactcctattctatcggaaaccccctgcaaatacaagcgttaatttccaaattttatctttcaaaaattacaattccgcctatggcaatgaccgccccgattatcttgttccacgcaaagggggctttctcaacgccaaacagcccgaacagctcaatggcataagctatgattatctgagagaccacaatcagaagagccgccttggccggtcccaggcttcccatgctccggataaccgtgtaggtgataagtgctcccatgataccgcccacaagcacatatttgggcgtaacctgcatgaggccggccacaggctccctgcctgtaaacagccatatgaccacgcaggtaataaaggccgtaagctgtacccagcccgcagccacccagacgctggtctgctttgtcacttccgtgttaaatacgccctgtatgctcattaaggcgcctgacagcaatgctatgataaatcccatgtattattttcctgcctttccattcattttaccgttatcttagcattcccacaggtttctattttattctggcattctctctgcatatgatgtataatcgttccgtcaggaggcacagctatgctatcatttataaaaacattattacaggccagcgcatggcccatccaggcacctgagccatactccgcctttcacatcctgctctgcgccgccggcataccgcttgccgtctttctggcccggcgcctggcacgcacaagtactcacccttgcggtgtgctgtttatctgcggcctggttttagctgtcagtgaactgtataaacagggcttcctatattttgtcgcaggccagggccggtacaactggtggtattttcccttccagctgtgcagcgttcccatgtacctgtgtctgatacttccgttattcaagcatacgccccattgccggatggagaaatgcatttgcaccttcatgcaggattttgcacttttgggaggcgtcatggccctggctgaacccagcggcctcatgcacccctatctgcttttgaccctccatgggttcctgtggcatttcatgctcatcttcatcggcctgtactgcgccatgaccggactgggaggcagaaccccaggcgactttgtatccatgcttcccctgtttttggcctgcgtatgcatagccacgttcataaatgtggcttcccatccctacggcaatgccgatatgttttatatcagcccctattatccaaacggacagattgttttccaccagattgccctcaccataggtacggccccaggaaacctactgtacctggcagccatggttctgggaggctttatctgccacctgtccctgggccggctgtttccccggtaaccgttctgacggttaccgccgcccgcctccagccatccattcagacattcagattttcagtcatgcagattttcagtcattcaaaaagccgcctttgtccggtatccggccggacccaaggcagcttcttccatgctctctttccttaatacgttccctttttcaaaagtttgcgcagataggcaaaggtggcttcctccccctggtccttcagcatgtggagaagcttctccaaaagcgctctggtcctgggatggatggtgatataattctttgtatactcgtaatattctaacggggccgcgctggtgtaggctttgcccttatacacttcgcaggcagctatccggtcgcagaccatctcagccacataccgcagaggcatcttatttcccaccaggccctcctccttatggttggaaatgtcaatccaatactcataatggtgcttgttcctgcccttatggtgaagccaggccctggaataccccacagtctcacgctccgctgcattggggctgcggtttccctgataataccttaccccggtccagaactcctccggactgtacttggagagatcatgggtaagtccctgccagtacaggccaatctgaaaacaatgcttcctgaccaggtttctgtgccttgtaatggtagaaaaatggttccatatattacagattttcattcaaatcccttctttacacattaatacgcatggcgcactgcattgaaatatgctctagtatatcataaatttcgcctttttggctgtatttcttcatattttaacctttgaacaacagaatctgaggtttatataaattgtttatacttaatgcccaaaaacgtttgacacttttcaacatttatgatatccttaggacagttgcgaaatagtttgcaacatatcacatttttttattttttatattttttggaggtatcgtaatgaaaggtacagttaagtggttcaacaaccagaagggttacggatttatttccgacgagcagggaaacgatgtattcgttcactactcaggtctgaacatggatggcttcaagtccttagatgagggcgcagaagttgagttcgatgtagtaaacggagctaagggtcctcaggctacaaacgtaaccaaattataatcaatgaacaacagtgtacctttttcaaacatatatcatcactgatagaggttgaagtaagttatatctgatttcaaatgattacaagtaagagccagtcctgcgactggctcttattgttattttgctttttccagcatatccttcagttcatccacggaaaacgtgtaattcttattgcagaaatggcagttcacctcaatgggcttgccatcctctatcatttcccgtatatcctttctgcccacgctgatcaacgccttctccacccggtcctttgtacagttgcagtaaaatgcagccggaagccttccgccgatttccaggccgaattccccaagtacatactccagtatcatctccggcgtgttgcccacgtccagcagggtggtaatggacgatatttccttcagcttgttctccagtctgccgatgatatcctcggaagcccccggcatcagctgaatgatgaagcccccggactgacgcaccgtgttgtccttattcatcaggacccccagcgccacggaggacggagtctgttcagaggtggcataataatatgtcaggtcctccgcaatctctcctgtcaccaaaatggtctgcccaacatacggctccttaagcccgatgtccttgatgacacttaagacgcccacgcccagcgctccgcccacatccagttttcccttttcattaggaggaagcatcaccatgggattaaacgcatatcccttcacatttcctctggaatccgctgtcacggtcaggcctgcgatgggtccgtccccctgtatcttaagggtaagaaggtcattttcccccttcatgtcacagcccatcatcacaccggccgtcagcagcctgcccagggcagccgttgccaccggactggtattatgggatattctggcctgttccaccaggtccctggtggtggcggcaaaggccctgatctgcccctgtgccgcagttgctctgattacataatctgccatatgattcactcctcgtctctcattgtctttccctgttccctcatgattacatagatgcgttcgctgtcttcccgcaccggattgcgggtacacgcatcgtaagcagccacaaactccataccagcctccaaggctgcccgtttcacctcatccaggctgtaggccttctggaaatgtgtctcctcatacttgcggtacagctggccctcacggataaacagggtaaggtcatactcgtttattcctgaactttcatcatagaaattgtcccagataaagctgctctcctccctggcctccgcaaaggtgttatctgccagcaattcccggtatttatactcggtgttcaggtcaaatataaataccccccttgggtccagataattattaaccagccggaacacctgcaccaaatcccggtactccatcatatagttcatggaatcacatatgctgacaactgcccgcaccgtgccgtaaagctcaaactcccgcatgtcctgcaggagataaagaatgtcctggcccgaggccgcccgtttatccattgccatctgaagcatttccccggaattatcaatcccaatcatatcatacccggcctctgccagaagcccggtaaggcttcccgtgccgcagcccaggtccagtaccaggccacgctccactccctgctcccggagcagtcctgttacataggaacaccactcctcatagggcacattatcctggaaaatatcgtagacctccgcaaaactgctgtaagcttccatgtcctcatccttcccaacggcgccgcgtctcattcccgcagccatcgccaaatcatcaaactacaaaagcgcctgtccggaacagttccgggcaggcgggtaaaatcaggggctttatgcgttctttccgcagcacttcttatatttcttgccgcttccgcatggacagggatcatttgggaaaatcttcttgcccttgcgcacggtaccggacgccttctgggacttatacagttccttgcgcttatccggtgtaagaatctcgtcccactggggaagctcatacagccagttagccttcgcctctaccatattgtagtacagcttctccgggtcaatctcaattttaacctcagtatcctcttccatggtatcaatggggttctcatagcccttcaggctctcattgattccatccaggaaaccagtcatgataaggatttccgtattgtacttctctgccaggtcctttacagtgcccgtgataacctctgttgggttagaaagaatctgctcatagattcccttctcaatctgaaaatatccagcccacaattcttctttctttttatcatccaggccgtcgccgtaagccagatttctccatgtctctaacagtgccatagtaaaaccatcctttttgtattatttatgttccaggggcttcctgtccagggcgccatgcctctttctgtctgccggaccgttctgctgcctgtccatggccgcccataacccttagtatataacaaaacataagatttttcaaacatattttattttatacagctaaatacagccaaataaacctaaaacctgaggcattccccatacatcccaatacgctgtttttgtttcccctgcaaatcaagggtattttttctgtttttctgcaaataatatacctgaatccaattcaattcaaaaggaggctttaccatgaaagtaaacggaaaaaatgagagcatcaaatgtaccatcaagaattgtgcttacaatgcacagtccgaggattactgcacccttgaagccatcaaggtcggaactcatgagatgaacccaaccaagaaggaatgtacagattgcgagtcttttgtaaataaggctcagtaattccgttctcagggactgtgtccggacaggatatattgctgtctggcacagtctcttttttcttttatttatcagacaataacatattatccacattcttctccacaacattgtggataactcgacaaattcgttgatttatccgcaagcctgtcgaaaacagtcaaaaagaaaagcacccgcagtgatataatatcatcaatcacagtggatgcttcctatgttaacatggttttctctttgtatttggtcccattccttcccgcctggaattatgggtctggttctggttttctggctttaccttttccgtaatgctgttaaacatttcatttgacttttttctggcctgcttttcttcttcatatctgtccatatccgtctcccatctgccgcctgcatccgcgggtgcacacacggtgcatacacggctgtgatttctctgacaacagtatgtcccgaaaagaagaaaaatatgtaaaaagttctaaacttaacttgtatttttttccaaccgtgctataatcgaatcaatggggacatagctcagctgggagagcgctgcgttcgcaacgcagagaccgcgggttcgaatcccgttgtctccattttatatggtgtgccaaaaccctttgcacagaaaggattttggcctttttattttatatccccctataaattccatatacatcccaaataaaacctgtaaaacataaaaatcatccgtaacatgaatgaaaccaggaggaaccacatgatgaatgatgaaatctttatgaaagaagccatacgcctgtcccagctggctgtcagccatggaaacgaaccctttggagcagtgctggtcaaggacggcgaaattatcttcagcaacgagaaccagatttataccggctccgatcccaccttccacgcagaagccggactgctccggcgtttttgcgcagagacgcatatcacggatttacgcgaatatacactctattccagctgtgaaccctgtttcatgtgctgcggcgcaatggtatggaccaaattggggcggctggtctatggcgccagcgatattgatttgtgcagcatacttcatgagaaaggagccgaatgctgcaaaatcgtctttgagcattccccctggaaaccgcaggttacgtccggggtcctgagggacgaaagcctaaagatattgacagcttatttttcaaaaaatacaaaaggctgagacattctctccactgcctgactccggggttcttagattctatggatgaaccggctgattccggaaagaccaatacaacgcccggcgtcttgtgcgaaaatggcagggtgggcataaagccgcctgccaagccgtgcagccttaacccagacagcctctccccgccatcaaaatggaagctgtgccggtgtatactggaccgtaatccatttcagctccgtaaactcgtcaatggaataggaaccgccttctcttcccacaccgctgttcttgactcctccaaaagccacagtggagttatcagaaaccgtcgcgttattgatatgcaccataccggcctccatgtcaagagacagggacatggcctttgacaaatcattggtcagaagtgatgaggaaagtccgtattgattgtcattgcaaaggcggacagcgtcctgcgcatccactgccttaatgatggaagtgaccggcccaaagctttcctcatagaatatcctcatatccggcgttacatccttcagcactgtgggctggtaaaagtttccctcatgggtcccgccggtcatcagcacggcgcctttggatacagcatcctgaatctggctgtcaatgatctggcactgctcctgtttaatgagaggcccgatgatggtatccttctggtgcggatcccctaccttcatggttctggcataggcagcaaacgcttcacagaacgggtcgtataccggctcctccacaatcagcctggatgtacacatgcatatctctccctgatggaaaaatgctccgaatcccgcaatcctgacagcctgttccacgtcaaaatcctttaaaaggataagaggattcttaccgcccatttccagagaatatttcttaaaaagaacggacgctttagaggcaatccccctgccaacagcagtagatccggtaaatgccaccatacggatgcgttcatcttcaataagcttgtttccaacctcctcaccggaaccaggaaccagattgaacacaccttttggaattcctgccccgtccagggccttggctatcatcacacctgaaacaggcgttgcgctggctggtttgagcacaaaggtattgcctgctgccagggcaaaggccacctttttaagagccaataacaatgggaaattaaagggcgcaatccctgcaaccacccccaggggaagccttcggatcatggatatttcccccgcctcctgctgctggacctggccgaatacccgccggcactcaccggctgctgttctgagtatatccactgcaaatccagcttcaaagtacgcctttccaaaagcagaaccgctttcccccatcagcacatccgccacctcatccatgtgctcctgcatccagtcagctgccttcagaagaatctgctccttttgggcggccggtgtgtctgcccacggcctccatgccctttgggctgctgcaatagcctcctccacttctgccccgcctgcaaaatgcaccctggcaaacacagaatcatcagccggattcttatcctcagccacatatcctgtcacagtgtccttccattccccgtttatgtataattgatattccattctcaatgcctcctatctcatcttcagcagggctttaatggctttcccgctgtgggaagcctcaaacgcctcattaatctcatcaaattcaaacacgcgaatcaatttgtcaaaggggaactttccctgcttgtaatatgaaatcaactgggggataaacagtttgggatttgaatccccttccacaatgcctatgagggactttccctcgcccatcagctcctcctggacctgtatggtcagctctcccgtcacacccaataccacggccgtccccaggaatttcacacaggccagtgccttttttacaaagtcaggtacgccgctggtatcaatagcataatccgctccgccttccgtaattttcttgatttcacttacaatacagtcacattttttccggttgatggtatgggtggctcccagttcttttgccaggacaaggctttcttcatttcctcccactgcaataatatttttacagggacacagatgggctgccatgatggcactcatgccaactgtaccgcagccaaacaccaccaggcttgagccggccgtgggtttgagccggttcaggacagcgcccgctcctgtctggattccgcatcccaatggtcccaggatatccagttccaaatcctcatccactttaatgatactgttcttatggacaacggaataggttgcaaaggaggattgtccgaaaaaggaagaaatttcctggccattcttggacagacgcttggtgccgtcgctcatgacaccgccaaaattaatggcattaaaattctcgcaggcatagggtctgcccgccagacagctcttacaatgtccgcagtatccgaaggaaaataccacatgatcccccttctgaaactccgtcactccctctcccaccttctcaacaatcccacatccctcatggcccaagacagccgggagtggtaccggaatcatctgatgctgcgccacctcatccgtgtggcatacaccgctggccgctatctttaccatcacctccccttcacggggatcctgcaggtccaattcctcaaactggaagggcttacctttctctctcacaactgctgctgttatcttcatctgttaaacctccctctctcttatttattgtaccatcatatcactaatcgcgataacttagaacaatagtttgcattttaacatatttactaatattttaacgataaatcaaaatattttttacaatttctgactttatccgactatagtcatacatttatttacattcagggaattcatctgcccggcaggagttcagccgaccagcaggagttcagccccaaaacagctaaatacgaaaatatattttctgaaatgcaaaaaaaccagacgtcacagcctggccattatatctctaaacctggtatattcggatttcctaccatgcttcaggcggatccgttacctggcttttactgtactcgaatattaccttgttaaaatccttcccccggtccagattatatttactgtaatagagccacacagtcagtttatcgggtgttccattcatctcattatgctgggaaacaataccctgaacctcatgctcaatccgccagggtttatatacaatgacatacaggtccgtttctctgacattcaaaccgctatatgagaacaccttatagattctgtaatcaggcagccgaatataacaggccgacaggagcaataccataaacaggcctgcggcggccatatatttccatatttttttcatttctccccctccattactaatagaacggagaagtgtataataattccctttgttcggtcagtatgcttgtattttttgatttatttccgacacttataatatcaggagaactattacgataaaacaatacacaatatgaaataaggcccgaagcagtttacaattttgttcttatactgcggaacttcgtgagaaatgaaagcctcacagtttcttacggttatgggagccctctgttggatgcattatcgtgatgcattatcgtgatgcattatcggggtacattatcggggtacattatgaaaggcgcattataccaaggaccattgtttatggtacattttatcgtttattttttctgtttttactgttcattacaagaattgcttgccatcctccctgcctatatgatataattagtctcgttggagacatagctcagctgggagagcatctgcttgacgtgtagagggtcgcaggttcgagtcctgttgtctccactggatatttgtgccggaacctttgtttttacagggtcttggcacattttttattattctgatgacaattgctcaaaaagggactaaaccgattggcctaatcccttctctgcaagcagtttttcaattactatcattctctttcccgttccagattccgttcttatccacgtaccatccgtcagttcccaggccacacgttcataggtactgccatcatgccgattaaaatatctctctttccatatctgtaatctcagcttccgtactctcttctataaaataccgtatctcctccatcacactgtcggcttgggcgctatgcggtacgatagcagccacgccaatgacaatgatctggtgtatatcctgctctcccacctctgccacagccacgttaaatttgttccgcattttagacagcaggcttttaacaaccatgcgtttttctttcaatgaatgaacccagggcgcatggagcttgatttttaatgataatatcagcatttcgtccacctcgtaatcaaatacactacgtcacaatttctcatcttttaattgtgtcacttccatccactttgtcatgggtaattccagaatgaccttaattataaatatccaatcccttcatatttataaataaactcctctctgccacttatccacaaccataataccactatatatagataaacacaatatcaatcctgattatcttgtgtttttagtggataatgtggataagtgtgtggataaccggtggattaaatgtggatgcaaaccgttttctttttataattcctttttatggttcccttttacggttcctccatccatatttcatttcccgccgttttatttaccattttatttgtctccccaaaatattgccccatgatttataatgtagtatgattaggatatattatctagtaaactgacctatcaatcacaccacaggaggtattaaaatgaaattcttcaccaaggcactcatcatcctggcggttattctccttatattggcattgggcgacagcatattcaacggtcttttcagcaatgacggttatcgccccgtaacccagcaaatgaaagagatcatgacaggaaccgattaggttccttttttgataccctgtcgctgatattcacaattttcttacaaatcgttcatattttcgctacaggatgctcataggatgctcatatttagcccatatactatatcttgtaagttgatattgctaatcagactttttttcataatacagccggcaggagaaatcctgaccggctcctcccttttttaaggctttttgacctgtactcttcctcccacaccttgtccacccgcggatgagggctccagattcaaacaatatctgacgcctcccccagtttatatctgacaaaaataaaaatactccacctcattgatgataatactcatattggggttatccagcaaacttcttgtcctgtttataacatttatgagcgacttcttataggttccgctatcagccacctccaccgggttcctgacagcagagacacaatgccctactttccccagttggcagccgcgtatctcaccgcatatcaagctgtgtgttgtcactgtcccggtgacatagactcctgtggagccgtactcctcgtccgcagccatttcccagcatcttcccacaaagtcgtctgtgtaatattttgtatcaatcccaaaaaatgtgataatatactgctctgttgtcatattaatacccgcagccttttacaatatcttattcagacatagcgcattcattgcaggtccacatatcttaaaacagattcagaacagtgatactccatggattcccccttctattcctccctgcctatctgctttatgatttgattgacatacgtgctcagccctgccagcaggattccctgggttatggcggtaaatattgccatgaaaatttcctgcccagaccggcatgtacttgtggcaagcacataaatcccgcatatgacaattcccaggccgccgttgattaaggggatatatctgtccttcaccgcctcactctgcttaatccacatgcccacaaaatacagcacaagagccaccacaattaactccggctttacataatccgttatctgcatacacactttcctcctgttacttgtcttactatcagtatattaagctgaacaggttttgacagtcccaagcccaaaaaagagaagccctacggctcctcttcccttttcccataaacctcagtatctgctttctgtctcagtgtgttaggccccagatactcgccaccgtgccatctgggattgaatgtctctacattctttgcctgctcttccagttcctttgtggatttctgctctccctgtttcattttcatcacctctgggatagtatgtaccatgacagtgggaaacatgtatcagatatacagtatcagaaatctccgccccggcaaagcccctgtgtttaaaaaatcagccccggcacgccactggcgccggagctgatttaaaaaggggaggataagtattaattacaaagtagtgtctccaaaccaacgtttttacgttgtttttaaaaattttgtgactaacttgtgactaaccgtttacaattatcttgaatacatctttacaatcaacgacactttttaactattattagtatcagcttttttccgattgctgacatctccccatttgtattggacccaattaagagtagtaacaaccgctcgagccaccttctcgtcaacttcatcatgctcgcctatttctttcatacatatattgacaaacttgtcctcgtctattggatatgtcatataattttctccttagtataaggtagattcacctataaaaatattagagatttgcgtatatccgtatccattacaccccttataaataccatagctgcgccctcctttataaatatattcttgtctttaattggataacgcagctccttgattttccctccgctttgctcggaattccgagcacttatttaattttataggcagtcggtctcaagaaggtcataaaatttcaccttcaagcctcttgccagcagttccagggtgtccactcgcggcatggcccctttccgtatttcatgcaccgtagacggggacaaccctgtcatgatgctgacctgacgctctgtcaatcttctcttttgcatgagttcgtcaagcagtatcttcataaatacgaatataccactttagacccaaaataccactggaaatatataccagttgtggaaaataaacgcaatgatataataaactggaaggagctgatacatatgaaagtaataccagaaatgacgtttggaagtctcacgacaaaatggtcctggaaaagcaaagaccaaagaatctggaaatgcacctgtaagtgtgggggatactgttatgtaaaagaagatgcattaatatgcggcgttgtgagggactgcgggaaatgcattatcactacataatttcataccccgtcatcaatatagcgtgtaaggctgccatctccaggttggcagccgctgtctcttcgtccacataatataggccatgaaaattcatttgctctggaataagattaatggcctcaaacatgtctgctgctgctctacgtgaactataaataacgaaagtgtcttgaatcatagaatacctcctagaattaatagatagtcatattataccccacaacctctaaattggtaaggtcggtaaaatggtatggtttgatacacacaataccgttgtactgtatcatgtaaaaatcagcgccatgagattggtctaaattattatgcgctactgggattttggactatgactgtcagtaactcttcctcgatggctattgatatatcttaactcaactggacatactacacctaaaaaagagaggtgattatatgccagcagcgcataaaggtgcaatcagttttggccttgtacacatcccggtggcgctacacacagccacgcaggataatgacatccattttaatcagttatgtaaagaggatgggtccagagtaaaatacaaaaaagtctgcgccaattgcggaaaagaagtaggtacacaagacattgttaaggggttcgagtttgcaccaggccagtatgtaactatgactgatacagattttgagaaagcgaaaactgagaaggataaaaccatacagattttgcattttacagatataaaaaatatacgtcctatttattttgacaaaacttatcatgcagttgttgaagctggcggagacaaagcctatgaattactccgtaaggccatgtttgatgagggtaaggtggcaatagctaagacagtcatggggcaatccgaaaagctactgtgtctaattcccacgccaaagggaatgcttgtggaaaccctatttttcgcggatgaggtaaaggaaatcccaaaggaaccggcgcacccagaattgcagcagcaagaactggatatggcaaaaatgcttattaactccatggacaaagagtttgagccagaattgtatcatgatgaataccagataaggctaagacagattatagaagctaaaataaacggacaggaaatcgttaatgcgccagcagaacatcaggacaatgttattgatatcatggaggcattgcagcgtagccttgcgcaggtatcagacaataagccaccaaccaaacgcaagccgcggaaaaaggccgcaacggcatgatggacctttttgacagtaagaatatcaagcctatgcttatcggcaaagaaatggcccctttcgatgaccccaagtatatgtatgagctgaaatgggatggagagcgctgtgtggcatatctggaaccaggaaaactgccagaactgagaaacaaaaggaacgtgcggatgctgaataaggtacccgaactggaagaaatcagcaggcaggttaaaaaacgctgcattctggacggggaattatttatactgaaagatgggcgccccgatttttcgttaatccaaagaaggagcttgatgtctgaccgttttaaaattgagttagacgccaaacgcaacccggctacattcctggcattcgacattctgtattgcgattataaagacacattgctgcagccgttgacagaacgtaaggatttactttccaaggtcgtttcggatggcccaaggatggccatatccagatatacggaaggttgcgggacaaacctctttgattttgctttgaagcggaagttagaaggaattgtggctaaaaagaaagatagcatctatattcaagataaaagcacttctgattggataaaaatgaaggtcatgcaagatgatgattttgtgatatgcggctatatcctaaaaagtaaccacatgaccagcattatcctgggacagtaccggggtaatacattaatctataaaggacatgttaccatgggtgtcagtgggcaggcgtttgatatcatctccagacatcccacgcttccatctgccccatttatcgcatatccggcaggccacggcaatgaccgggccgtatggctctctccagaccttgtatgcattgtaaagtttatgcatcataccaaatctggagggatgcggcagccggtatttaaaggattaaggtttgacaaaacagcagcagaatgcgttgaaaaataaggcgggtccggtttatccggtacccgcttttataatttctaaaatccataaatctttatcaatttctcttgactttgcgcccatttgggcgtaaaatataatcagagataaggaaaggggattaaatcaatgactataatcagcagccagcaccacatagattgggaaatcgtagaaaaaaagatagaagaaattaaaggtatcacaaaggtcgtcatcccttgcacttatgttggttatattgatggaactgaatacgcaatgcagaatgataaacaccacacactagcagccgccagagagcttggaattgcagtggaatttgatatcaccaatgattcagaggacctcaaaggagaggcgcttttagaacagcgttacaatgatggagattggtataatgtagaaaccagtaatccggcatattatgaatttgatttagtttggtaggaggtgcgaaaaatgagaagatacccagattgtatcaggacagacggattatgcgggacctgctccgcatccagttacggaagggattgtcataataataatatcaacaaactgttgtatcaacgttccctatccgggatgacccagcagcaggtggccgactctgcgggaatgaatatccgccagatacaaaaatttgaatctggagaaagggaccttggaaatatgactttgcgcaatgccttgtcattggcaaaggcccttggctgcgaggtgagtgattttgtctaaaaggccgccaaaaagtaccaagatttgtgttgtatgtgggaaaactttcccttgttttccatctgacaaaaccgtcacttgtggaaaggaatgctccaagattcatcgttcccgcacacacatggggctgtcgaacgcatggagcgaagaaagtcggaccaaaaaagctgcacaagggaaaacagccaatctcgcattaggaacacctgccgcacagaaaagtccaaaatccggtaaattcttgacaaatatcaatgcaaaggactggcatttaattagtcctgatggaaaagaatataaatttcattgtctgaattattggctccgggagaactgcgataaattatttggctgtatgccagatagtaaagaatttagaaatgtaagcactggactgtcaggagcaaaacgggcgatgctcggaaaaaaatatgggtgctgcacatataaggggtggaaagtcatacccacagaacatgatataaaaaaataaccacacttcaacggcgaggagtaatcaccgccgttttttatcctgccagcatcttcacagaattttcacggatgaatcccttaatctggtcatatccccatccgcagcttatgaggctactcaccagcatttccatggattctatttgtttcagttcgtctgacgtcacatattccctgatgctttcctttcccttcacaccgtattgggtctggagctccttcatggtctttccgaagatggtcttatagattagcttggtatagttcggatacataaatttcttatgaggactgtcagctactttcattttaatggtatcagtcaagatgtgacgtaccaggacacccttctggcgttcaatctcccatttctgccgttcagaatataggcgtctcagttccttctccatctcattaaaagctttgatgtagtccaacttccaacgtaacaccttttcgccggtaaaccccataaccagaagcgagaaaccatcacgggtcataagatattccttctgctttcggttcataatatctaaataacatgtttcaatgaaataagatgcgctcaaatctgagcctatctctgagacaagtttttcaatgtctcttacgacgtttttatgctccttctcaaacttctctgccacctgcctgctactggcggttaaaacatcttcattgtttctttgcgtaatttccactagcataaactccatcctttctatgcgtttatttaaggttatttaaaaggtatcacatttaaatattcatttctcccaccccagcgatacgtacaataaaagccctgggtatatcccaaggccctttaaaactcacctatgtactgctccccatctggcgctacatacatagcgcattccaacggatgcccggcccgcggctcaaaataataatccttgccgtcaattacatgccaattggtcagagcgtatccgtcaggattaaaataatacttgtgatggtttataatctgccaacactccttgtaatactctgtggtgctgtatgcataccaccagccattactatcatggtgccagcccacctcatactccggccgctctaccagcgaccagtcaggacgtccatatccgtcaatcctgctgttatctaagctgtactccttacagcatactgctccgccattggcaaccacctcgctgccgtcactggtgttgccctcaatggtcctaaccttggtcatggtgacctcatagacgatgcctgtatgacagatgcgctgggagtttttaaaaaatatctggtcccccggctgtgggctgtccttgtgatactgtcccttggttttataatactgagccgatgtaggggtgtaggcggagaatccaccacccagaagctgctgcgccgctacccggccaaaagcctgcacaaaacaccagtccacaaacatgtcacaccacggctgcccctggagagatgggtacaggtccctggcatactttgtataattgctgctgccagcattcgcggtcttgctgtcaagttggatgttactacgtttctccagatatccaatctcattctttgcaacattcagtaatttatctattgatttcataaagcctccaatcaaaaaaataaggcccgggactattcccaggccatgataagttgcgatatcgcaacaaattactgtctaccctctatgagctgcttaaacgcctggtgcaggcccgtacttgccagcccgctaaaggccccggccaagatgatatccgggcttaccccgcccataatccagatgttaagggccgcgcccagcagggccaccatggtggggatgtatttgttatccaggtctttcacccactttttggctatgtagcctgtaatcaggcaaattcccacaatgaccaccactgtgtaattgctaaaaaacgataaatccatactctatacctctctttctgccggttcttccggcatcttcataagcttgtctttcagttctgttgccacatcattaccgcccaggacatggtatgcgtcatacatccgcttaacattctctttaccatatatcgggcaaaatgtcttatcctgataatgattgtaggcctgtatgatacggtccctcaaaagtgcctgcataccatcatggagggccgctgtctttacggattcctctttttgtcttttgagtatctgccggtacccaaatcctaaaagggtggagatggctacaaacaaccattccacccaatgaacacttatgtattgtgctatcacacccatgatgtctccttactttgtgtagtcctctccggtaatctccttgtagtccgcctcggacagtttgcccgcggccaccagggccttaagccggtcaatgtcccataatcttgggtaatacttttgcgccaatcctttcacgtccatggtctcacctcctcctataaatcaataccggccataatagccacgtaatcaatgtcagccgtattcttttccacctgtgcggccacacccggctgagatagcgttaggagcgccacacggccatatacggcctcggcggtaacggttccgtcatccccgtactgctccggggaaatgagatagttgtcatcaatactctttgggttatccagcaccgtataaccatcgtatacggccagggtgctgccatccccgttgacagtcttaatctgctccgtggctgccgcatccgtaaacacggccacgatatcctccagcggctccgctgtctggaagataagctgcagcgtgctgggagtagaggatattccgccgatgaccagcgggtactcctttccgtttttcaatataatcttttcattcatacatttattcctttccgcccggcgacttgccgggcaataaaataagccccataagggataagggccttgtttgtttctttcataaaaaaatagtctcaaaatcccaatcaagagaccttaaaactattcatcatacgaatcatcttatttttctataccttttccaaaaataaatcctaacgcaagcgaaactatgggaaaaacatttttaacaaattctgtataggctgacattcccatatacatagcatgaatcatatctatggcgctcattagcaataaaatacaacaaagaaaaaaggctatatgcatagacgcattttctttcctagtaccaaacatttttcccataaatcctccttccttttctttatctttactatcttgcagggtcgttattatcatttgtttgttttcgtcactcaattgattgaaaccctcggtacgtattagtgttacaatagtctcttctgctccaatagatgacaaaccattcttcatatatgccacctacctttccctaaacaacgtgtattctattttcctaattgcacccgagagtttgtacacccaaaagtgaactgatacttccttcccattagctgttgcaatgtcaatggggctattggttcctgctcctatatcagcgaagtttttgcatacgaactttacataatcggattctacagtcttttttaaaccttgcccttttccatcatccaaaaactcaaaaattagcttaaactgaaattcggtgtttggcacaacatttatttccacgtttgatgataaatcataggtaaataccattgctgattctaatatctcatagtctccagaatatgttttataattcataaactttcccccctggcttttttatcatcatacagcaaaaaaccaaaaaagaaaagtatagtctacaaatatacaaaataagcccctggtttagggacctgatttgcaggttacgactcattttttcttatcacaaatagcaatttagcggagaatttaggaaagcttatatcgttttcgtccgaaacaagttacacaagttcggctgaaatgatgaactatattcagaacacggcgcctattggatattccgttttatataacaacgcaaataacacaatatcaacatgttatacctacaaagcatctaataacacactgcatgtcatgcgcataacaaccaatggtcaatcaagcctagatgctgctttgcattggtgcagtggaggggcatggaacagcaagagaataaccccgacctaattgtacactttgctataataatcattttttaaagataactcgtattattattggtattgaaccagttgtattgatgcagtatcccataagcgataaagttccgcttgcattagcccgttgatttgccatgacgcgaagccatctgtcgccatatccatcctgcgcaaatgcggtaatagatacgatatcgctaaatgtaaagccggctggtggagatgatattgcataactggattcagtccacgtttttaacgtggtaatatttatagccgtagcataatccatcactacagtactattttctaaactcactaaattgctatctatgctatcttttacctgcttaaggtacgcgctggatgggaccttatttgtagctgtggactctgtctgcacgatatcagtctttttaagataatccgccaatttcgtggtaagggcagtattgcttaccagctccagtgcaaccttatgggccagcacatccagcagggcctgggcattactgtccgctccggcagccacgacaagcccctgtgtatctgttgccttgacggacattgccgtaccgtcaaattccgtaacccctgcacactgttctgcataacctttagccgcctcgcagtatgcctttgcattatcttttgcatctccttcttccacaccgccaaccgcataccgctgtgacttgcttgcataatattttgcattattgccttcaaatccggtgcctccgatagcccagccctgcgccgtactggctgcctgttccgccacacctttggacgtctgcgcatccagagtatactggcggatggttgacaggatggtcggttccagcttggcaagggtgatttttccgtctggtatgtccgcagagatgttttttccgttcgcggttatcctgatggtatccgtggaggaaaacgtgtatgtgtcgataaacttgcttagggataccttttgtttggtcccgtcggccagctccagcacaaaattgtcaccctccagatagcaattgagcgcaatcttttcaacagccgtgtcatgcgtaaaggttgaaccatcaaagcgtgtgaaggtcatgacgcctgtggtatcatccatggtaaaatcaatgattacattcgccatatccgcggcgtccgccttatcctgagccagtatcagaatacggttgtccatctcattaatgccatcctcgatgtggtttaaatgtactgcattaataggggattcaatactcggtttatcccgccatgtaaatggagaatagtatttagacaacgttttcgctgccctgctcatcctgctcagtagtcccatccttatcacttcctttcgcatttaaataatccaccaatggttttccagactccaatatggtagccattgtagataacttccttgcctcagccactcctttaaaaactaatccattaatgtaatccataacagcctgtacatccttctggttgtagaccagcattttactttccatacaaatcctccttaatttgctttatatccatcacaatctgttttatatcctgatgctctgcctgttcatttgcgattatcaatgggattaagttctggtattgcagcgccaagtatccgtcatagcggtcaaccaaaggataactcagttccagtttatgcaacagtttaacaacatcctgcgccacgaagcccattgcatccatgctgctacgcttggtcttatatgtaacaccttttagccccaatataagacttctggcatcttccagtgctatattgcgaattcccttcttcaaccgtttgtctgaccatgtggaccccgccaattcactgtagatagaataacagcttatccgatttgcataggttataccattcaatgttgcacttccatttacagtcatactcccatcacaattcagacggtcagtctctacatgattggcgtttattacatctgcccccatggaaccagtattgatgcacccgtggaaagtggccccagtcagttccatatggccgccggcatccagttttgtatttccagcattaataatgagtgcacccggagcattcaggataatctgccctccgttggatgattcggcagtgatttgggtacacacatctcccttactcacttttaaatctatcttgtctgcggccacacttatagcagctgccagctctacttcctggtccgtggcccgcttaacttctgcggttatctggtcagacactacctttaattgggccgtggtatgcttctccaggtccgtcaccgtagctgatacctcgtccacgttacgcactataacggctgtctttcctttcaattggatgatttcattctcaacaccaaagttctgactttgggttttggttccctttgcctcaactgtatccatcatggcctgtatgccgctcatggtccgggtaaggacaaaggtagctatctccgtgtccgtagtgattgcccgcaggccgtctcccacctctatccagggcatagcataggatactatcttagccgaccggtatgtcttgccagcaatgatttcatatatggaccaagccagtttggtaaggtctgcgctccccaagccataggccaaaaagttaccctccactatataagcgttgctgccggaaccgaccactgcgccgatgtctccatcttcctgccggacctgtactcggtcaatgccatctatcaggtaatcctcataggtgatggacctataatattccagttcctccgccgctgtccatccagactgcggatacaggtcgtctccaggatacagggtatcagacggatacaggccggtatcctgcaggctgatatacgtcaacatgccagtgcggtcaaagtggccgaacacaccattaatctcgcagatagccttaagcatatcccggccgcacaatgattcagggctgatagtcttgccgaccaccatctcgtcattgattagcactgtctgctgctgtggtactcctatgtgctcgcatagactgtcccgcagctcttggatggtatgcgtggtatcgtctgtggggtacattgcatggtaccagtctgacacatccacatcaaacttaatcatccggtcataggccgtgattttccgctttctgcggtcggcctgcttcactacactgtcaactacatagattccataagccatcttataatcgcctatactcagcgtggcagtaaactcccggccctcaatttcctcatctacatcggctactgtaaccacaaacttagccgcctcgcagcttccccagacaatgttactcccggaggacaggttttcggtaaggctcaatgtctccgcgcatatctgctccattgggatggtcagccacggcgtccccgcgtcggatggatacaggttatcggctgggtacaggtcgtttgctggatacagtgtatcaaccccgccattaaaaaaagacagctccagatgtttcactgtctccgtcctgttattgtctccacggcatctatgtttcacaaactctggtacatccagcaccttaccacctccttaatactcaattagtgcaatacggatgggattatatcgtatatcgttttcactggtgtcataatatggaaattgaatatctggtacgtaaaatgttcccgtaacatatgcgttcctctcatcgttccagtattctacctccatggtcacacggtccgggaaatatgattgcatccttatcttatcagccagatgcataaacggagtagaccactcgatttttgttctggtatgcggaagcacattccggtgtagtatcccatatccgtcctggtaggaatcttcatcctgtctctggtccggggttgcattgtacgaagcgtgggatatgaagtccataggaaactctcgtccatcgaattttaatagccagcctttgtatgcagacataagtaccacctctttctgggcataacaaaagcacccggttccccaggtgcttttgttgtttattcgcttatcagttccacaaaatacgctttgatagcaggcacttcctcctttgtccctgtcaaggccctttttacttcttccatacccgtaaatacagcatagatttttaacacatcatcttttaggattttcatatcatcaccgattctactgtcatacataaaatattcatcgtcggcataaatctcatatccatcattgtcagtaagtaccctataatattggctatcatcaaataatccgccctgcatgatttgctggactttggctgtaattacaatccgctgacctatatattcctctggattccggagtatctttttgtaacctatttcctgacaagattccttaaattcttctggagtttcagcaactccgactgtttcttcaatagtagtttcagggctttctttgttgtccgcgttttcgctaatgctctgttctataacgttttcgttctccttgctgttcaaaggtacaggactcgcgtgataacctataagtccaaccaaaaacataactaccggtagcaatatatacttcttgttataagcaattcctttatgcttataccatgtcaaaaccactgcgtatccaatagcaagatagcaacttataataaatatatatttgaaaacaaatctcatattatattttcctccatacctattcacctaattataccagatatggaggaaaatgttaatacgccaagcccaattgtcttccagtttcttttcgatactcacccgctccagacttccataggtcaaccacatcgtctttattcactcctggctttgcaagtatagctcttagaagttcattctgctcacgaagcaactgattctgctctgaatttgctgcatatactgctgtagctataccatcagtaatctggtctttattagccactgcagttctgccaccaatccgcccaaccatttccggacccgattcgctggcaatgaaaagctgtcctctatcaggaaaaccaccgcttgcaaatgtaggtatctttccaaggctaatctctccgccttcatataccgtctttcccatgactgtaattgggtcaatcgtaaatgtaagtttctcatttaaccattcggcaaaatcattccatatctgtttggctgcatctaccgctgcattaaatgctgccttaaatccttctttaattccatcaaggccggatgtccacttctccttagtaaaccattttatgacatgttgattccaccacccttgtatgtctgttttccattgtaccacggtctcatcccatttggttttaaggctggttttaatggtattatacaaatcactccatttctgaaatgtaaaccatggtgctatatgctggttataccattcattaagtgattcagtccattctccaaatgtggctctgaacccttcaataatgccttccaggatatattgcccatatggctccatctcctttgctggtgaatgtataccaaatatatcacatatcccattaacaatccatgtgtataaatctagtattggttcggtaaaaagagcaagtcccgctgcaaagccgttaataatcccttctaccatattgataccaaatccaaccaaatcattttctatgaacgatgcgtttgctttggaaaaaaattctttagcactattccataattctcctgctacattccagttaaatacgccttccccaaatgatttccaaaactttttagctaaatctccaccacgaatagtatcaagtaatagacctattatgcctccaaccaaagcaccaacaggaccagttaaagcacccaatcctgtactaacagcaattaacaatccttcccctaatgcatcgtctacactttgtccaaaaagttcagcaataatggcgtcaagtttatcgacaatctcattaccaataacatcaaatgcagggccacccacaaagcctacggtaagcccagtaagagccaatttaattccttctaaagtaatccctgtggatgcaattgaggccagtattccctttgctattattccagcaattcctacaaacttaaatcctgctatagatgctataatagctgcttctattggtgctgcatcagtaaatccggcaaacaacttaattccagcgctgatagcatcaatgattaccctacccgattttgcaaggatagtattccagtccaatgccgcgaaaaatccccctattttctgtcccaccataaaccagtctgtattttccagggctgttgctatggtatccaacaaccctatcgcaaatacagaggcggcacttccaagggcagaaaaatcaaaggtcgagaaaaatccgtttattcccgctgctatggataatccaaagttggaccaatcaaactcttttccaaattccagtgctgcatacaaggccgtgttgagtgctccaccaatggaatgtcccacttcccagaaaagctctggagatataaggccattgagaaactgcgcaaaaccacgtccgaaatttcttgcagattcatacgcatcattccaattgattttccgcaaggcatctgtgatggcggcgccaatataagcgccaacggaataataatcccccaccttaaaggcatcaattattttatcggatatcttatctgcctcggcctgcacattatccataccaaggtccaggtcacccaggatgcctccaccgcctccgccaccagcaccaccagaatttcggttagagcttagattattaagctcatcaaacttggcaagctggcgattcatttccttcgctgagtttgccgcgctccccatattatccgcaatgtctccagcagagccggctgcagaatccatggaatctgccacgcttccactcccacctgctgcatcaccaaatatagcaaccgtaaaggcacggaagtactcggccaatgtctgcagctttgcaaggatggtattaataacctggattacgggcgtaaaggcattgataagcccctgtcctattgttgctctcaatgcctcaaactgtagctgcaagatacgtacctggttggcccaggagctgcttgtcctggcaaagtctcctgaggcatccgaaagctgtgacatgacaaactgataccgcaacatgaccttttcctgctcagtcatcttcgcagttgtttttccaaatccgttattaagagcgtattggtccagggctgtctgggtcatgacaacgccaaggtctttaagactttctgtctctcctgtgaatatgctcttaagcttcgtgtaggcttcatcctgagaaagattatagaatgatgccacatcacctgtaaggcccgttatggctgctgacatatcgtatccggcctttcctgttataccgaatgacttagccatagcgccgtatgtacccatatacttcttcgccattgtctccgacaggccgaatgcttttgctgcatcttttgcaaatgcatccactctgccggacatggcgccgaaggtgacgtcaacaacgttctgcacctccgtcaaattgcttcccaggtcaatacatgattttccaaatgctacaatagccgcaatgctcagtaccgatgccagaatagctcctacccgtttccaggaatttgctattctggcagtctgccgctctattcgattcgttacctgtgccgtctttgcctgtaccttttccatctgctcctggtacggcttcgtatacgcctcaatgatgaccttaagcttttcaagggtaattccactaccgtccgttatcctcaccgcctttctgttctatatttttaatcagcccacgcttccggcgcatctcgttgtaccttgcggcgtattcccttctggatattcgtgcctgttccagtgcttctaccttttgacgttcttcaaaagctattctttcatctgcaaaaaggctcgggtatgtatcccacacatgcggaatcttaattgtcctatcagtatcatagggaatttgaatatacatgcctatcaaatctgccaactcataacgtgctacaatttcatctcgcactcttctccgttcgttgcgggcgtatgagtccagaaggtcgcgaatttctcccagtgaatattcccagaattcgtctggcctaatgccacagtccaatgcgagaggatataactcataaatgatggaggctatggttacatctcgtccttgaggtcctccctcttgtccatcacactctccctctggttctccgtaaaaaaaccactcaccaacataatctccatgataacatcaaccatgaggtccatctgtgttccgccctcatctgcatattggtcatacaaggcctgtacatccttatatttaacgccgtgtttccagggcgtcatggctgcctgaatcactgttagcatgattcccaactgtggcaagccaccactctgcataatcaacgtcaccagattacatcggaatttttcttccaatttacaaatctgctgggtggtaagcttaagtttgtaatcttctccaccaacagtccaatatgcaaaagcctttcttcttttcttaagttcctcaactgtttcaacctttttctcggcctcgttctcttcgtccattccaaactgtcccatattccattatcctccttattattcagggtccgtcacggtcaaatcgctctgtaatgatatagcaaggttaaattcaatcacaccatttactccgccgccagttctttttacggatacctgtccgtcaaattctgttttagtgccatcaatcagcgtttcctggaatgacaatacctctcccgcatcctgtgccgccctcatgatgcgatatgggcaatcggctttggaattatcatacttaaatttgtatgtaatatcaccggcatcaccaataccattctcgtattgcttatttttgtcagtcagacaagtattctctaccttttctggttcaatacccatttccgggatttctttaagccctggaaggtctgtaaatgtagagcctcctgacttcttatatcccaatttcgcgccattagctaacatccaattctcctttcttatatgtcgtgatagacctctttggtatttacatcaatcaccatttcatatctcatctgtttgtgctttcttccacttgggtcatccacatcctggcatcctgtacgcaataggcccagcttttcaattgcagcatccacagcaacagctgcagcagttgtactttttctgtgccatatatctatccgatatctgatataggccttctgctctctcatatctgtatactctacaaccttgttatcttcttccatatactgaatggataaatccttctcccagtctttaggataacagtcagttacgttatctgtaacagtgaggagagcagcatacacctcgtccttaacattaatcatcattcacacaccttccttaattcgtgtttcagggccttttccatcctttcaaccaccttgtcctcattgtttttcaaggcaggatacataaaaggctgtgccggctgccctgtacactggtaaaaccggccatctggtgtatccaggtaaaaccagtgatattcttccgctgcttctttgtcaacctggctttcatgtatccaccagggagacatggtataggccggactggctacaggggatatcccggcatggttggcagctcccttcggtcctgttcccatctcaacgtacatagcgtatgctttgttggtatacacagtcccaataacccggtcgtccatacgctcagtcatggacttgatactgtttcttaattcaccctgccggacaggacacaaaagctttgcttctgcctgtatgcgtttggcctgctgtcctaccaattgctctatttgctggtcgcagacctgttccaatgcagcaaacttcctctccaactccttctggccttgtatcataacttttccacctccagggtcaggaaccggtatggatatatggcaaccaccttgtaatccggctccgcgctaccgtcaacacataagcatatcccatcattggccgtgatgaccgggccgtccttgactgcatagcttaccttacctgttcccggtacttccttataggtcccctggattctcaggttgcggatatttggcagacgctgcccatacatctctgcctgtaccttcccgcctgccggccactcctcggccttaaaggatactgctgggccatattccaaatatgagctaccctcgctatcctttttaggtattgcctcccggtgatggtacgttcccagcctgctccgttttagtctcatacgtcttgcctcctatccttgccagcctatacctgtccagcgtgtcatagatgtgctttggggcattatcaaaactatatgattctccgccgccgctccggctggcctcgccctctgtacccatacggtttagggcaatcacggccaagtcacgtactgccttctccagacctgtcacaatctttgtacggcctgtataggacagcacaaaggctgtggcctcctccaacaaaagggagagcaatatatcatcactctcccctgtcagctttttcagcttttcgatatcagtcacatggatcatctccttaaccattggttatcagtcgggcaatcggaagggccttagggtcaaacttaatttcccaattggcctttgcaaaaagctgtgcatccgttggggattccgtccaaccagaggaggggattttaaagctgaacccgtttggatggagggtttccctcatacgtgtgataagttcatcctgcccaccatttttcttggcttccctcactgtctctacaggtacatctacccggcccttagcagtcctgattacaccattgccgtacaaataagtggtgtactgtttcaggtccttattggcgccatcaccacctacagcagtacacggtactccatcatcaataattaccgtgtaaccatttacagatgcaatgttcattggtctttggataccattagcatccgtatatttccaatattccagcaactgtttattctccaatgtctttgcaacattggaatgcatgatagcaagtgtgaactggtccttatggtccccacatgcctcggttgcaaggtcatttaaatctgtctcctcaatctttctcggctccgctgtgttggaagtcagtgtaagagaatgagtatcagaccatttctttggattcccgcttgctccagtaattccaaagatggcatctgtaattcctatcatccttttctggcgccttttctgccaataccttgaaatggttgatacaatgtgtcccatagggtcagaaccagacaactctgcggtaaagttccgcgcgaagaatccttttgcacggccatacaccacgccggtctggaacccaccgccagcctcctccacagtaatatccgtctgtccgtcatagttcaggtcctctccatccaacgtgttgtaaaatggtatggtgtatatattccctctcccctgaatcatcccatcgattgttgaatcctcaaccaccgcgccggactctatcatggctgtcagatacgggtccggtgcctccctccacatatccaaaaataactcctcgtcaaatgctattccaaaaatcgttcctggcataaattattctccttccttatttcccagcgagctgcttatacagctctgggttgtttgtttttaattcaagccgctccttataaccaagctttacaaactgttcctttgtgactgtttcctctggaggtgccttctttggcggtttcccgccctccagcttcttgtctacttgggcctgtaccgcctgcgtaaatgctttttccaatgctgcaatggatttattacagctatccgcatcggtataattaagcaattctgcaagagaggcaggcaagtccttttctgcaagagtattcttagcttctgccatcagttcccggcgcgtgatgtccgcttcccgggctgccaatgccctctcctgcttctgcgcaaggtactgcgctttctcctcctttgtcatctttgcaagtttctcggcctctgacagcttatcatcagtaagcgcctgccatttctcctgtgcctttgcaagggcagtatcaatccccttctgcaccctacggtcaaactcggcctgataatccttgttttttaggatatcatcaaaactctgtggggctgggtctggtcccggctccggctttgggtctggctcaggtgttggcgcgggttctggccccggttctgcaaaaagctgtaagttcattttctgatacattggttctcttgttctcatagtctctatcctttccgccccagcctgttcattcgcccaggccgttgcataaaaataacacccaggataatcctgcgtgccttttccttagttattccaattaaaataccaccagccatcattaaccggtggtatcaaagaactgcgttagctctatctcactctttatatatacctcattaataaaatggtcactatataccttaattatatctcctgcataatcatatatttgtattagtgtaccatccacatcttccaacagcttctccttagatagtggggcaatattcttttcgatagcagcacactgcttttggaatatctcgtcgtctgctgcattacatatataatactcaaacatattatcactccaatcccaaggacttattaacctgcttgtttgtctttctggatgttttaatgatgtcctcgacagcctgctcataggtcattcccttacgttccattttactgtctatcaattcctcgaacgtcttattaggctgctcctcatccagcttacgccgtgtttcctggtcacgcataaggtcccttgcatttgtcctgttttcatttctgagacggcaggcctgctttgcctgttcctcaacgggaagggtcttgtcaatcatccccggaatcttctcatcatgggccttataccaaatgcgtgtttccttgtcacctagttttccaaccaagccgctcatttccgaaaactccatccggtttatacggtcctgttttccatccttaagcgcgtcccatctcttactatcattatacttcatatcctgaaatttatcaaaggaatcaggcatgtcttttccgtatatcgccctatacttattaaactgctgctggtccgtcctgcggtttttcagcattgtttccttctgttccgcctctggccttcccttgacattcctgccgtaccactgttcataagtcatgttggctggaacggtttcatttttcccggttataggattcttggctctgcgctgcatctgcgacaattcctcgtctgagatatcacagatagttgtagaccggcaccacggatgcataggagggcagttaagtcctggctgctgctctgacaccttaaaccgtttaccatctaatccccggcacacagttgacgtcttaaggtccagggtcgccacgtagatatatgtctcaattccacattcattataggactgcatctccatctgattagccaggttgcaggattccgttcgcaccagcctccgagcattgccggcaccctgggcatacttattggctatgatttcagccacctcgccgtcagtccggccagttaccaggttgataagcagctcctgtttgaggtcctgtgcaagcgccctggtgttatgccagatacgccctgagtaattggtgccggaccacctgctgttgattacctcatcaatagcctttgggtcaatggtggcaaaagaaaaacccagccccgtccgttgctggatatcgaaaatgctcctataatatgcctcgttggcaaggtccacataatggctggtgctcctaaccttttcctgcttataaatctgctgcatggtcaggtcaatctggttctggagctgttggaaccgttcaagccgtgcctggaatgctgggctttccagttctacaaggatatccgctgctgtctgcccccttccaggtgcccttaatgcctgtttcagctcatccaacgatgtcttgtcctttaagtcatttagcagtctatatgcctccgcgtctgtcaagtgatgcttacgcttgtaccgctcaaatattttatccagctcatggctgatatacccggatgctttttgatacaactttgcgatatcgtccgcggtatcttcggctgattgcatatattcaaacatccgctgggcctttcggcgctcccaatatgacagactactcatctacatcacctgggggactcccatcatccagcggcggttcgttgctcccaaggccaaacattgctcgttgttgtttcacggcctcctcggcctccttcgtaaccgccttgacctccccgtccacatctgtcacgaatggtatttgtgatagcaaggttttcttgcttaccttgccccacagatttgcggttatctggcttatttcaagcaagttcttcggcattgcccttgtgaataccgggcttattccggttgtatccacattgatgcttctggttttaaggaaatttgtaaagagccggatacgcttcctgagccccttcttataatatctcgtcttgattttcgtgatattctccatccccagcagcttgaactccattgccacaccagatacattcccggcaaaggattcgtccgtcatgcaaggaatatgggaaaacttatggatatcctgctcaatggctctcctgagaatctcaattccagattcatcaaatgtacgggtaacatactccatctttccaccgtctggcatttctaccatcttttttttctttaattccaccattgccttatcggcccctgtctccccgttttcatcttcttcatcgtccccaagaagcgtaccataaactgccagtatcgcatcaataaactgtgccttgtcattcacccggtctgacattatagtgttataagcatcaatcaggggtatctgcaactcgaaatcacccatagcaagcttgttattctggtattcgacaatgggtacatcaccataaaagtgtggctctggttcctcgtttacggcctgtggctcgtccctatcaagtatggtcattacatacttataattctgagtacacaccgttgccatatacgctgtaggcttatggtcggtatcatccttcctggcataataatagacagcaaataactcgttctcctcaatggtatcgtcatgcaccataaatgtattaagtggtgacaggttcttgattgtaggaaccggctccccttccttcgtgtatacatactcataggcccgcccatagattgacaggtcaaggccgttgtctccgtctacctcatccacacctgcatcttcaaatgcatcaaggagtggttttatatccttgtcggaattgtatgtcactggatttccgataaaataactgctggctgtatcgctgatatccttagcatgattacataccagccgggtgtccggtccatccttcttttccccttccagtatcttatgctgcccctcgtaatacttcaagttcttccgcatccttatgaccagttgctgatgtttcataatgaggtggaggatatcctgcttgttcaggttcagctcatcgtatttatcacctggatatgtaaatgtgtatatagccatcacctcctttaataaaatccgtagctggatttgttcttgatttttgccctattgttattaaggaccatataacagaaatagcgtaccgcatccatagcgtggtcatgctgctttatcggtgcatcctctccccggttaacggccttcgcatcccatatgtatgatgcaaattcttttatggtattaacacatgaggcgctgaatgcaatcttttcctgatttaacaatgtacctaccagacgtatcccgtcctccacatcattttttgctttgagcaccggataaccagcctgccttaatgccgcaatgaaggaagctgccgatgggtcaacaatgacacccttaacttttatccctccaaggaatgctttgaaatcactgacatattctgcatccgttctctgctttgcattatcccggccagaatagtaatactccctgatgcaataccatttcccatccacaccgcggttccacagaagaaatactgttgcattctgggtaccgtagtcaatgcttacatatctcccagaattgtataagttggcaattacctttttaacatgcttatccacgtcaaacatatcgtagataatgccttctgccattgcccacagccccaggatatagcgcttgtagaaaacaccgctgtaactttccctatacctggctttaatctcttctgacaggctcaggttgtcatccatggtaaaatggacatacaacagcttttttaaggatatctcctgcttcttctctgctgcttccttacgctgccgttctacatttgatttccccagatatcccactgaacggtcaatccagttcgttttgaaccaatgataagggccgtccgggttgcagttaaaccagtatttgcttccatcaacggagcatcggccggttgcctgattaacaaatgattccggcatcaaggccacctcatcacaaaacaggcccgccaaagtgataccctgtatcaggtcctggctgcgttcatccttacctccgaatatgtaaaaattattggttacaccattccgtgatatctccaccagattgtccgcccggtggtccattactttatatccgcggctccgtagcatgattttaagccagaacaacacattgcgccggaaggagccaatggtctttccacacatggcgaaattctggccagagaatgttttcatagcccagaacacaaaagataaggacatacagaccgtcttaccagaacggatagcaccatccgcaatgataccatcatagtcctttaccgggctgctcggcatccaccatgtaagtatctgcttctgcttttttgaaaacggcttgaacttaaatacttgcagctttgttatgatattccgcttttccttaatccgctgtatccgttccttcatttgggcaatgcgttcgttaatccccatccacatcaccccacagacttgatgcctcagcatccatagctgccaggaatccatcatcttccgtttcctggtcctgattgtccaccttgagggttgcgatatcaagcttcatcaactcgatttccaggcgggcatcatcaaagccaaaccgatgtagggaatcaatcgctttctgcttcctggcctggacacgggtaagggcatcctcaacggactgtatctgccccaagacaccctcatactccgtaacctcaatgggaccgttggcgccgaaaccatctttccactttacctttgtcatgccttcggccttcttcttagtctggtcctctgctgcctgtttgaggtcattgacgcgctgtaacatcctacgctccctcacggtcaggagttgtatctcctgcagcagcagctctcccttatccctcggcaggactgcaataagttcctgctcatctggtgtaagggtatcaaaaaagagggattcaaactcccccgtcttaaccgcattcttattcccaggcggcccggtccctccatgccctacagcattcttgtttcctggctgcccacctctggattttgttgtacaacgttcctttttcttttgttgtacaacattccacttatcccggctcttccagacagctataaccttctcgtcctcatccagctgggctgcaatttcacgatttgtaattttacccccgtgctgcttatatatctcaaatgctttatcccggttgggactccgccctcttggcacgaccaccacctctcaatcgtttcgttttcaaatttactaaatcagactactattctcccatcatcttcactgttttatccaatgccaacatcatgttgcagttcagtgttatttccgatgcccataaggccattaaccggtaatccgcagcagttatcttctcctgcatggtacgttcccatattgctttagcaaggtccagattcctgtcagcgataacaagccgcgccggtttaactcctaataatggtttctcccatttctctcccatgttcttgtcctccttcatgatatataaaaaggcacctgattactcagatacctctctttccgctcttaatctattcagttcctctatcatactattaggcacgatactgtacccgaccagtcgtattttcctgggcgcatcttgtcctatctctatcaatccctttcctgccaggtgctccatgtaaaacgcaacagatgcagtagagcttagtccaaccgctttgcatatctcccgtatggtcggtgcatacatatgctcctgcatgtaatcaacaatgtactggtatatctgtgtctcccgttctgtcattttcatatgctttccccctatcttagtcataattatatgacatcctcatggctgtgcatctggtaatatattccaacaaggaggccccggacaccctgagtttcaggtgccgggaaaatgggtatataaaaggcacccattgctggatgcctaaatgcttacacttttctcaattataattatagcatacctttttgtttaattggtttaatttgtttaatcttttatgtatttttttactatttgagaaatacggccttttgtatacccaactattccagccacctcaatagctttctttccctcaatataccgaagggacaaaacctccttatccctggtatcttcaatagttgaaatgaattgctccacttcatccacctctttctctgcctgttcaatctcctgacccaatcttttaatacgctctgcttgtttatcagcttccactggttcttccatcataactgtaaaacgctgttctatgtatgggaaattaggacttgacccctttacttttcccagcacagtaggaatctctttcatctgctcatcctgtattttattcctgtttcgctcaatcaaccgcttattcggcatgtatgattccagtaattttcttgtcaaaatcattcctccttatcccgcgcacttgccatgtaccgcctgtgtctcctccgggtcctcgattatatagcactccatggtcgtattaacattgctgtgtcccaggaccgccgctatgtccttaagtgatgccccatgccgggccatgtatgtagccagatacgcccggaatctatgcgggtgcagatttaacccttccaaccgcgggtcactggctactatctctttgagcatcttgcgtatggtgcaggtgcacaccctgccatacaaacctccagttttcctaaaatttatgaaaagcgccgcgctggtgtctggcagcgcccggcgccactccagatatgcttccagatgtacaatagcgcgtgaagtgaagaacgccggccgctccttacgtcccttgccgtaaatgatgcagcgcttcctgacgatgtctatgtcaccaacatctaatccgaccagctctgatatacgcatccctgtagccaccaatatctccacaatggctctatccctgacatgccggcagccacaccggatgatctccacctgctcgtccgacagcacccgcttcacacgctgctcctctttaatcttatagactttacccatgggattcttcttcggctttctcataaggcagccgccgtcctcaataaggtcctcattcatcatccatttaaaaaatgactgaaagacgtgaatcttattattaagtgtattatccttgttgtggtgctccgtctgcttccaggccagataggccctgatgtcattgcttgtcacgtccgcgtagttcttccgcaggaattggaaaagacatttaagttcgccacggtagttcacgatagtggcatctgttctcttctccaatttcaggcactgcaggaacatctccaccacccgaggggtatcatccacgtactctgccggcaactgcctctcctccgactctgacaggatggtcttgttcatcaaattcatgtacagggccgcctcgacctctttctgccgtctgagctcgtcccacatctccatctgagttaccaatgtgtttaatacctgccgtataaaaacatctgtattaatcgctgtctgcatattatatcctccctcatttatggtattattttccacttgttcaccatgcttgagtaagctataatatactcaagcaatatcagagcggtggtagcatcttggcgggtgtccaccgcttattttctttcacgcacatatgttctttcctgtcgttttttattgccggggtaatcccccggcttgttttatctatactcgttttaccacaatcggtatcctgcccaaatcgtgcccgcatcccttcaatacttgcgtcaccctgtcccattcatcggccagttctgacgcgttcccatcctccaccctcacaaaggtatatcgcttttggtacaggatacccacatcactgtaatgctctatctgctgccggtgccggatacccaacattaccatcagctccgctgctctgtaccggccgtcgtattggccacaatcatacaagtcatagtacacaggtcttgatgccacgtacaatcactcccttcggcggccgtcgcagctccgggaccgggcacaggctggtgtacatgtaggccggcgccgtccggatgcgctccttgattgcctcgtcggcctgagcggccagggccttgctgcggtcgatgcggctgaccttggactgcttactgcttttctttctcatagacaccactgcctcattacgtgtgttaccacctttaggagctgtactgcaagattcagtcctatataaaatcctgctcctacgatgatgccaaagctgtaccattcaagtacctttttaatacactccttgcacatctcctgattctcctttcgtatcaaagtttcagtttggttcatcatgatatttcaatgcctggccgcaagttgaacagaaataatcatcatcctcaaccacatctgaatcacataccggacagaggcactctgcttcatcaccagctgaataatatgattgatatgctggtgtccacaccaccattctcggctcacttttgtcttttaaatactggacttctcctggctccaggccggtatcctcataggctttcaatctctcaattaattcgcggtatggattacctttcatgataattgcgggcaatccagtatcacttgtggaataagccaacagtctgccttggtcatcaaccttcgttaatcgttccatgctgttctccttccgaaaatttcagttttgctaactaaatggtttcggtaaagacatccaagccaacacatcctcgtcataacgtaatggcgttccccatctatacccataccatgtgccaatggtcacatccctatcccacagggtaatcaacacagtatcccctatttccggcaaccgctctgctactggtatccaaccacagcaatcaccgccgccttctttaatcgcctccattgctgaattcataccagccataaacatatgcaattcagcattgcttaattttgacttttttaatatttctcttttcttctcatctactttttcaatgaatctactgacattcatatatgcaattccctcctccggttctcccggaaatcctaattttactcactgtcttcacatgtgcctaaatcgtccagataaataatatctttcccgcactctccgttatctcctcggtaaacacaatcatcattactgcaaacaactattgtttttcccatactatcatccttcctccggcctcccggaaatcttaattctgattacagcagtcatcccccgactcctccacaaggtctctatccatctgccttattacctcgggccactcacacagcccggtgtcctctatctccactggtctccagctacaggtattgcagtccttaccatcatcccccgactgtgccatccttcggcactcctggtagtccttctccatctcgtccgacacatccaggcgcagctccgtatgcggcgccgggaataatttaatctttctcacggttctcctccttcatctcctttataactctgcacactgtcccttcatgcagtcccatatcatccgcaatccaccggttgctccggcctgcttcatgcaacgccatcaccttgcccttgtctaccctcttggcccgtttgggatgaccgtccactgcggacctatcttccacgcaggaatccctggatccgcttttatttttgtcaatagggaggggcatcatctgctcaagcctggaattatccattgctggttcattccggaagaacagacagccgcccagcaggttttgcagtgtatccggtgaatagtcctcccaccgcttcggttccggggtgttcggtgccataatgttaatctcctgccctacggcagccagccgcagggcctctatcatatcaatctgtttcacgaacataatccttaatctcctccagtctgctgactgagacttcatacgcaatccgtttctcacactcggtctcactcagttgcttcacatattccctactctgtacccggccccatgtcctgaccctggcccccacctcaagaccggatacataccgggcattccggccccagctgatgcaaggtatgtaatcagacttgccatacggccggttgacggccagaaggatgtccgcaatctcacgtcccaggggagtcctgcgataaaccggcggcttacagatgtagccatccaggaatatctgatttgtctttgtataatctgtaaattcctccatgaaacggacctcccggacaaaaacggacagctccaggcggttcctgatgccctcatggcggttgtaggaacggaactggccaatggcctccatcgtatcaccggaataatcccggtgtacatccagcagacgctctgacaccattaacggcaggatatccgcctggccactgagccgcttcacagcaatatccaccagataaaagccttctccaaaagcctcatgactaaaggtaaattccgatacaatctcaccaattacacttaccttgttgttttcaatcattttttctgacattgtacatcctatcctttcttcaccttctgaatctctttcagtttctcaatcaataatccccggtttgcctcacaatcccggaagaacttcccatcccgcagcagatagtactcatgccggccgtaaccatcatgatatttggcctcatagcttcctgacgcatatccatcgaatatccttgcgtgatacaccttgaccaccatgctggtgccgtcctccaggtcataccggtagtagcgctccccggtctgtttcgtctcaatccataacggccacgtcacatatgcatccacaaaggcagcccgttggtcattgttctttagcaccggcagttccggctgctctggcttcggcggcggattcacgatgtcatccaaatcgcacacatagctggccagggcacaaacctttagtttcaaccggcggatatgtatgtcattttcatccacatcacattttagcccatcattaagcagctttttggcacgctccagttcatcctgggcaatctgcagctcggtcatgggttcctccggggcccggatgtcctcctccgtttctgaaatctccgtgaattcaccatcaatcacggtatcctgggattctggcataccaggaacatcgttttcatgttctgatgcctcgtcctcagcacttcccaagaggctgagtaattcctttacgtacttcccccaggtcaagctcagaaatgtctcgcacatattatcctggaaatgaatccgttccgggccgcattgataaaagccgtactccgttgacccgctgttatgaggttctccgtgattgattatcaactcctgcctcagcagttttgcgttctcgtcattggcggcctgcgcacacggcttggacatgtgatgctgatagaagtccagaacacattcctcctgggaagggatggctgtttttccctgttgcacatccgcggcatccagcggcggacaatccggctctgtctttgggggttccagatgctccgggcgccgctgcgaactataacattccaactcacagttaccgcgcctgacgcattcccagcagcacacccggctgcagtcctccccggttcccgggatgagcttatgggcctcctccagggtgcagtcaaattctggtcggtggatgcacttcccggacttctctggatgagcctgttctgactttggtagttccggctcaggctccggttcttcatcctgggggcccggctccggttcaacttgtgacgtcacaagttccggcttcgccttagttccatgccagtactgatactcttcctccaggcgggcattctcgatatcaaaaactgtccggcccgaatccgggtagaaaactgtaacatcctgccgtttaagcactttgtacaccaactcaaaagctgtcacttcacactctttttcgggcctggaatacccggcatccaaatatgctcttacgaccgcagcaattgtagcgccataggcattgtcaattgtcctgtttccggctgtgaaatgtattacctccggctctctttcagctccttcatccagttgcgatgttacaactttcccgctcagccctccctcatgttccttcggctctggttgcaatgtcacaacttcctttacctgctgaggttccggcttccggatagcctgcaactgcttcactgtcatatccggattaaccagggtccgctgttcttccgtcaggtaagccagctccaccagctgggagaccttatactccctatactcctccgccagcaccgggctgttcccgtccttactcaactgatcattgaccttgatgcaccggctggcccatcccttatcccggtcatatttgtcacggacgaattcctcaaaattctgatatccggcctcctggaagagttttctgtcccggatggccttaagataaaacccaaccgctatgtaattcctgactgaggcccacatattggtttctataccatccatggcctgtgccaggctcatgtcacgttcataccattgcattacttcattcatcgcggtcctcctacttcatcgtctcatacatccacttcttctcattccactcaactgccaccggcgccccgcagtcatagcagtccacgtcaaattcagtctctgtcatgttggtcagatacctggcctgcctgccgcattcacatttcatgtacagcggaaccatacgctccatccttgtcacggccccgcattcacaccggtaatgattcagccgtgtcttggcacagaatcccctggtctttccacaggcagggcatttcatgtacagatacccgccataccctgcggagatgatgttaggcgccggttctccgccttccttttccggaatctctgccgcttccaccactgtctcagcctcctgtccttcctgacctggatagactgtttctgtcgattcctgaaccggtgccacagttacgccttcctgctgtttctgtcccctgctcccaatcagccacagtgattctgccaatttgcggaacgccgtcctcgcctggccctcatccatgtccatcaccatatatgctcctggcattgatatcctaactttcatcctgttctctccttcccaccggcatgcatccgaaatgaatgtgaagctccgtccgccgcctagtcttgatatacacatgatccccgcttatctcctgtccgcactggctgcagatatagactggagatttcggttgctttttttcttttgccttaatagccatgatgctccttcccgtacttctctcgttccctggcctccagctcatccatgaaccagttgacaattggcgctgccaccggttcctcctccatggtcgggatagggccttcccacttcctgaccaatcgggtgccatatctggccttgatggcatccgcctcacttaataggacattccattggtctgaatccctgaaaggaacattatcgcgccattttttccaaaaccgattatatacatccttgaatatatttgatacaattttattattcacttctcctcctgttgggtcacaaccggttacaaggatttgtaaccacttttatatctgtaaatcagcataaacactaggttttttatcatcggttacaaagttacaaggttacaacgtttttctctcacgtgcgcgaggtatatataatattaaaaaccacaccattttttcatacatatatgccctcctataagcttataaaaatcttgtaactcttgtaactttgtaaccgtacccttcaaacacgcataaatgctaggtttttgagttacaaaagagttctgatttttgtgaccggcttatagatttctgtaacccaactcaatcaaaaggcaattctccatcttcggttggtacaaattcctcctgattataaacacgctctgccatattgatacacgcacagcgcacagccttaccgttgacctttgctgatttatacaggttgtccttacctttggaaagcctgccggcctggtccatccatgacagcagtgccttgggattgtatccaccctcatcgcatatacgctcgaacacacttttgatgatacgtacctcatccccggatgtggagccaaaacatgggtctgtattgccctcaaatttagcagcattactcacgtagaaatcatggatatactcatatccacgggcgccaacgtcaacggcctcctttgaatggaggtatggttctatgtcttccacggtcaagccccggccatcgcagaataaccattccgtggccagtgcatctgctgtcaaaaggatggcagcagccatggtctgtttttctgtactcgctgtcccgatggcctgatagaaccccttatagagtccggtggccttttccttggcctgttccgttgacatgaatgccatgaaaagcttccctgcatgcccgtagtttgcccggattatatcaaggactccaatcacatcctcaaaaagtttttccctgcattcaatttcaatgatacggtttatggcaccggcgcctgacgcggcatgggtgattggcgattctccagatgtgatggtacagttcttccatgtaggcgttttctgcagtcctccagtctttgcccctctggtttttccgattccttcacacagcatataaaccgtctgctcaaatgatttcttatccttcaccagctggaattcatccaataccagtggaaggttgtttacaaaaccggccagttgctccagccctaccagggtcccattaaatgtctggaaataccctgctccgtcattcggatttgcccatacagacactgacagaagctgtgcaactgtctttcctgtaccggaacctccccaaaaatgcagaatgaagtttagtttctcaattgtctttattatcacggacgcaaatccagcggcaagcgctatcctggccacagaatccgtccttctgacggccttggcaacttcaagccacttttcataatccccgtatggatgcacggcttcaaatacctttctaaaactatccattccatcaaattccagactgtccatataagggctgaaaagcccgtttgaggtccatcccagatggctgacagactgtgactctggtatgatgttgtggttcaggtcctctatatcctggagatattccaccatatatgatgcattcttatcggacacagagatatccttgtcggccagccgctttatttcctttgcactgaacaatgtactcttattggccacaacctccttccagcccttgaaatcccgccggaacataagcttaagcctcaccgtcccatcatcaatgttgaccaggcgctgtaccggaaggattggatgcacgcaggcaacatccattccctggctgtcattgcgccgaacaatcccttcgtcattagcaatccaatccccggtaaacagttcaatgggctggtccttgaaactggtcaggttgtttaccacgctgctgataccgcccttacgttcctcatgctggccaaagtatgcctttaccatggtaccaaaccgcttaaaccccaccttctcggcatttgcatttagctcattgtatagctgcatatatgtaaaacctgagtcgcggtgttcgaacaggaagcggtaaggttcttctgtgttaaattcatccttggtgtaaatcttaactatgtcattcatccaactccctcatgtcctcctgttccttcctgtctccaaatgccagggtgatatatttataccggttagattcccttagacttaccgccactgcccattcctcagtaaacggctccatttccggcagcaacttatcaagcatccttaaggacctgcatacttcccccagtctaccgctacgccaactaaggaactgcctgtctgcatcttccttttcctgcttctcccttaagaactgcgcccttctagcctgcaatgccttccggtttcctggtcgataggtgccccctagcagtctgaatgcctcactaaagggcctctcctccatcatctgtacaaatgtaaaaatatccccatttgctccacaggcatgacaatgatagtccttttcatacaccttaagggatggtgttctatcgccttggtgaaacggacatctgataaatcccgcccgatttgggtggaacccgtaccgctccactacgtccctcatgctgtatatacccttgatttcttctaccgtcaattcactcacatccctgtagatattccttcagttcccggtacaagatatcccttatcagcctgccggttgtttccggtttgcagaaatccagctgcattccatatctggcccggaaggcatcaatacttgccacaagcgacttcggcctcataaggctgttgtatttcccattgtaaaccttttcccagttgcccccctctaccagcagatataccttggtaccggcctctctggctcgttcaaactcccgttcgaaccttggacgtgcctttccaaaacacatacatagctcacccaggtccatcttcctttccaccactgccctggaggagaaatcaaggacctcccctccaggcaggacgcatctacaagaatagtctcctacgtcaagcttgtggcgctcatgcggcaggccggcagcctccagacggtccctgagacgttttgtcggctgctcccgggtatccaccagcaggaccatggactccatgcatctgtcaatctcaaaatttgtatatgccatacatccaccttagttgaatggtaacccctcatcttccacgttatcagggatgttcataaatccatccccaattgaaacggtatatgggtcactggatgtctggttaccactcttctttagcagtgtgtctgctggaacctcaaatttcccagaacgtatcttttcaaccgtcaccagggaatgacagcttgtaaagaatccatgacggccgttgaaatcgtactccttgttgttaaacagggctcctatcaatttccctttcagggtctgctcatcccagttccagtgatgcccctggttcgattcctcaaaatgctgcattgttgtcttgaatcttctctgtcttggttcgtcctcctcgctgccatcatcctttgggacccggagtctgtatgtacctttccatttcttatcctcaccggtctggttcttgtagttcctcacaaagaaatccttttgctctccttcattgatgtcgaaggataacagaatcacgtccccccatttattttcctggtattttacgtccagaatctttaatacatacccacctacaggaagtcgctcactgtcagaataggcggcagccttctcatatccgttcaatctcttcatttcttatctccttgactcttctacagcatcaaagtcatccatagaataactatagataccttgtcttatatagttgttgtacctgacattgttaattgctttctctggtgaaactgcccatgacttcgccacatactctccattaagcatgaccagaaagcacttcttttttaacttagtatcacttcccatcattaaaaatcctccaatgctttcatcacctgtacaatatcgttctcaatctcaaattcctcaaatgcccccatcggggatttcgccgtactgttattcgccctggtctcaaacaggtatctcccatcaacacattttgccagcagtacggttgtgaacttactttccaggacaatcttattcagcttcttaccggatgtctggattctggtaaaccggtatcctgcatcatcggtctcagtctgggtgtgggccgtgaatacgatggttaaatcatcccggtaatcatagcactccacaatcaaatcccagacgcaggtggctaaatccacccacttatcatatcccttctccttgctccgccgcatttcatcggcaaccataagcccattgattgtatctactactatgaccttgatgcgtgggcagctttccgccaacttcttgatatagaccctgacaacattggcatcatcacattttaaataattcttgttctgctcattgtactggctccgccatcccttccaggacagtcctttcttatccgcgtcaatgtaataggtgcttttggggtccaggttcctcatggatgtggttttgcctgaaccggattcccctgcaacacagattactcttgccatctattcatcctccttatcataaacaatcaagttcctgctctgcataataatcgtgctggctatctgcttcatggaaagctggctctcattgtaaatctccaccaggacgttgtaggcttctgccgtcagcctgatgactggctgcccgtccggggccggctgcctttttctggccgggatatgtatcttcccatcatccatggtctgcatcccctttctgttcctttgttggcagacgcaggatggtttccttaatctgctggattacggaacgtgacttcacgtccaggcatccggattcaatcgcaattatccttcccagcagttccgtccggtcaatcaatatctgtttcattcctccaggaacacctccgcttctatcagtgccgtctcctccagcacccagtcatacatctccttcttctctgtactggctgcctcgcctgcccggcgggccatccgctcccggaagaggagccagagatgatggtacttatcttccatgcttactctccttcccggccataatctcatcaatatgttccagcatgtatgtgttcgccccatcccggaaggcttccatgaatttccccatggccttacaagcccccttcggctgctcaccatgcagtttgattaacatatccttgacggaccgggccagtatagtcacagcgtcccggcggctcatcttatcagcaagagaaatgttttgtatgcagtattccgtaccaatcagcgattcctccgtctgtttcgccgcaataacaaacaccgcattgctttcactaatccggatttcctccaggctcccttcaaaatcatgactgattattccttttatcatcttgcaatctccttttaaatcccttatactaagggtgattagattttttaattacctggactttggacggctccacccgtctggggtcctttttcatttcttccaatatctcattacttgctacctcagcccccgcctcaattctatctgcgttaccggtcataacaacaccagattggaccatggcctgtatgatgatacctttaataacttgtctctgtattattctcatctcctctcacagtctcacgcccatggccagcgccatgaccacaatagccaccatccacatccccagcagccagataaccgccggcacaatccacttagctgccctcatgatcgggccgtctcggcgcctcctgcaccgccggaaggtcaccatacgcctgtgccccatgatattggtcatcaccgcggtggccggtcccacaaaatccacacgccagccaggatactggaccgctgctctggcgcggatggctaactcagttacttttgtcattatgtttgtccctcctcccgtatccttcctagatgcctgtccagtttgggccggtaaacatgaaattcatcctgttttttacctgttttttctttaggtatgtaatcacctatatcaaatagatttctcctcatgtgttccctaacagcctgccttgacatgcctaattcttgagctgcctgtttaataggaaccctttcacacattactatcatcctccttctttccatattttgttcatccccctcctattgacaggggtccgtagcagagttacaattacactacgagctacaagaacatatgttcttattctttaagaaaataatcaagtggaactccgaaataatctgccaggatttgaagcttatcaaccttaggtttgcttactccgcgtttccagtccgataacgatgattgagcaattccagtcgcaagagacactttgtaagatgtgagatttctttcagcaagtaatctctcaaatttttcgtacaaaaaaatacaccacctttccttttagtattgtatttacttcggaaatatgatatactttatttgtcgaatgaagtatatcaatttaataaagcatttttcatacgaagcgttttttaacactgattcgttcttccgaagtatagctatactataacactttggtttgaagcagtcaagtccttttgagacgtttctacgaagtattgcttttttgtgaaaggtgaataaacatgtatgaaatatttgagcaacttttacagaaatacaatatctctgcttacaaattctgcaaagcgaccggaatatcccaatccactatcagtacatggaaaagtaaaaaaaatttagtaagtccagaaataggaaaaaaggtggcagattattttggagtatcgcttgactatttaatgacaggaaaagaggaacctgaagaaaaaaggaatccttatagtgatctaaagggcatatatctatcttacgccaaggaagcccaggacagcggaattgaccctgatgatatacgccttgcaatagatactattaaaaggctaagaggtggaaaatagttgaaccagaattgcaaattagagctatatcgtgatgtcatacgtataaagcgtttcatgggatttagagattttcaatatggaataaatcttgtgaaggaatttgaaagctttggaatacaaacagcagtcattccattcaagacccgtggattacgtggtatggctgccgtaggcgagaagccggaacctgatgtcatacttttaaatagcgcccggtctccgaatgaacagaattttgattgtggccatgaaacagtgcatttagccttacataggcacaccggccggactacttttaattgctacaacaggcctacccccaatcaggacccctttttagaatggcaagcaaatgaaggggcagcagaattttttatgccgtatcgcatttttattcctatgcttcgtgatgcagttggatggaagcccacaaacgttgatatagattcgtttatcaagacggcttgtgataccttcgtggttcccgaaatggcagtacgataccgattagaaaatttagcatatgaaatcttacaattttattctggtacggaattagtggacataaacattttatccaaaaagcatcaagagcgtagtggattacatctgatgtcactaaacactattcccgatggagccgcatttgacatttatgagtatataaacgaaaaaagccactcctattggcgcaggaatgacttttgacataattttcttaccggactgctccggaagatatattttgcttcgcaaccaaattatatcatttctggagcgctctggcaagggcgtattttttatacccaaaattccagaaaggattaatattatggcgagacgaacgaaatacccaaaacttccgaataagtttggcaccattcgataccttggacaaaagaggcgcaacccctatgccgttcatcctcccaccactgaatttacaaagaagggggttcctttgcggcctcctgccctatgctatgtagatgcctggataaagggatttacagtcttagtcgcgctgaaaggcggtacatactatcccggatatgaacgtactttggaaattgaagaaactgaggatttaaaaggtctctctcagaagattctggccgattataaccgattcaaaaaaactgatgaaattgacaagggtaagactttcgaggaagtatataaagattggtatgactataaattcgttcgtgataaaagtcgaacctattccccccatacattgaatgcaacgagaggagcatttaaacgttgtaagactttacatgataaggaattccgtcaaattacctatgatgacttacaaaaggtcatagacgacagtcctcttaaatatgccagtctcgaacaagtaatcaatctcttgcatcagatgtatgcctatgcaaagatatatcatataacggatgaggactgttccctatatcttaagataaataagcccgatgaagaagaacatggtactccattcacaaatgatgatctgataaaattatggaaaaaccatgatgatgaggatgtggaattcctactgattatgtgttattccggattcagaatttcagcctataagaatatggaaatcaacctggaagaaaagtacttccgtgggggagtcaaaaataagtacagcaagaaccgtgttgtccctatacacaaaggcattcttcctctggtcaagcgtcgattggaccgggatggttgcctgctcaccagcgaccagacctttcgcaagcacttggatgaaagggacctattaacccatcttggaataacccaccatacacctcatgattgcaggcatactttttctaaactttgcgaggactttaaagttaatgagaatgaccgaaagcgcatgttaggccactccttcggtaacgatataaccaataagacatacggccaccgcagcttgtcagatttgcaaaagcagatacaaaaaattaagattccgaaattttaatttgtgactaatttgtgactaaccgccccaaattcttttaaattctttccgattctttataaccattttggggcgccaaaatagccctatccccttgtatttaaaggaaaaaatcagccccggcacaccattgcgccggagctgatttaaaaaggggaggataagtattaattattttctctttcgtgtatactcctattatggccccatcccaaagaattatacacacccgatacatttttttaaattattttcctctcccctgtttttcccgccattcccgctcccctgccgtctgttttattccgctctgtccctacagtatcatcatcagtgtcccggttatcagcaccgtactgatgacgacggatatagagttcaccgcgcttgccagtcccacatccgcccccaggtttcctgtaaatgcaggtgcggcagaggacatggggctgagggcaagtatggtcagagcctgcctgtattctatcccaaaaggcagcaggaaataaaagaccagagccagtacaatggccagtgaataccgggccgcaagtatcttcacgattttacccggctggctgctgtccccgttcagcttaaatcccaccccaatcataagcatggccataaatgcatttgcatttccaatcactccggtaaatgaggtaatgggggccggcagtcccacatggagaagcgacagcacggtcataatcagatatgcgtcaaaaggaatggatttgagcagcgtctttataaccggaaacatgctgaacctggcgttcttctcttttgtcgccaccgccgcgctgtaggcccctcccagacagataaacgcgtttccggtatcaaacagactggttgccaccacaccaacaggacccaggaagctctgggcaaagggcatggtaaaattacctatattgtatcctggcaaattcagtatattgaatgcccgttcttcccgttcttttccgatactcatgaaaaaggccacggcgatatacaaaatcccgcctgcaaagcccagcagtgtcaccaccagcatggacggcttcaggtcaatccctgaaaaattagatataatcgccgcgggaagggttattttaagtacgattttcgataagacataaaaatcttcctccttaaaaaagcctgctcttctcagcagatttcccattattatgacagccacaaaagatccggccttcatcaacacttctgccattttatcatttctcccatccgttttctcttcccgccccggcttttggtttaaaccttttgatttaaaccttttgatttaaaccttcatttcgcaagtccttgttataatatcaaaaacaacggcagactgcaataacaaaacaatatgaggcaggcaaattgaggcaggcaaattgaggcagacaaatccccaggaatccccgaacagctccagtacatctccggtacacccccagtataatccaagtacatctccagtacagtcccagtacagccggaggacagaaagaaagaccggacgcccaacctggcgccggtctcttcaatccctttgcgagacagcacacatgctcacatgtgtcccagtcctctgtctcctttaaagggcagctttatactccggattcccgtaccgcctatacatatcccagcagtcccggcagccacatggacagaatcggaacataggatacaagcagcagtacaacaaatatggccgcaaaatacagcagcaggggtttaattacattttcaatcttggtcttacccacctttacacctacaaacagcgtcgttcctaccggaggcgtgatggttccgatacacaggttgaatatcatcataataccgaaatgtacggtattcatacccagggcctggcagattggcaggaagataggtgtgaagataagacaggccggcgtcatgtccataaatgtaccgataatcagcaggaggatattgatgataaaaagaatcacataccggttgttgctgatacctaacattgcctctgatacggctgtggggattccggtaaaggccataacccagctcatgatgctggacacgccaatcaggaaaataatgatgcctgtcatctccgcgctgtccaggaaaatcttaggcagctcagagaactttatggacttatagaagaacagggaaagaatcaggctgtacaccaccgccaccacgcttccctcagttgcggtaaaaataccgctgataatgccgccgataacaatgacaatcatcagcagacagggaatggcctggaagaacacctttaccttttcactattggaatatttctttgtgctgcggtaccctttcttcttggcaaaatagaagataaccgccatacaggcaaggccccagaggatgcccggaatgtatcccgccatgaacagggctgccaccgaagtgccgccgctgaccagggagtaggtaatcattacattgctgggaggaatcagaaggccggttggcgccgtggcaatattagcagcagcagagaaatccctgtcatagccctcctcttcctcaataggcccgatgatggaacccattgcggaggcagctgcggtaccggaaccggatatggcgccgaacagcatgtttgccactgcgttggtatgggccagggcgccgggaatgcttcctgtaaaaagctttgcaaagttgatgagacggatggcaataccgcccttattcatgatatttcctgccaggatgaaaaacggaatggcaagaaggctgaatacggatatgcctgaaaaaattctctgtgcccctgtaagcacggctgctcccgtattgagtaccggaagaatggcacagatggatgacactgccagggctaccgcaatgggaacccccgctaagagcatcactactaaaagcaccaaaataatcagtccgcagactactgctatattcatactcccgcatcctcctttttgccaaaatccgtgtgcagcatgtctgccgcgttcatcagactgaacatcatgataataatgcctgtcacaggtacaatcacatagatatatcccataggcaccctgagggatgctgtggtctggatcatggtcagctttgtgatggagatacctccgtaaaccatgaccacaccggcaaaggcaaaggtcagcaggtcaatgatgacttccaggtatttcttggcggaaccgctaatcttatccgccagaaatcccatcctcatatggtcccttttgccgaacacataggcggaagccagcagggccatccatgtgaagctgtaggttaaaagctcctctgaaacagtactgggcttattgaagaaatagcgggtaacaatctggtacgtcccgattatcgtcatcagcataaacaggcagatgataaaaactcccagaatctgcatgattctggctctcactttatgcattgtctccatcctgctttcctcccttcgctttttcgtttatttcctggatatgattgtacaggtccgcaatcttgggattatcctttaacatggtctcatgaagaggcagcaccttttgtttgaacgcatccacgtccacatctataaattccacgcccattttattctgtgcaatatccttggcttcctcaatgctcttatcccactcctcaagctccacctctgtggacagggctgcagcgtccttgaatacctggtattcctcagggctcaaaccgtttaagaatttcaggttggcaaccagcatatccggcaccatctgatgcttgttataggcataatacttggcaacctcgccgtgcttgttgttggtaagggccagctcgttgttctccgcaccgtcgataacgccctgctggatagccgtatatacctcaccgaatcccatgggggctgccgctgctccgaaggcattgaccatggccacgctggccgggctctgctgaacccttatcttctttccctttaagtcattaggggtatgaatcggagtcttggcataaaaattcctgacgcctgcattgtaccaggtaaccaccctgaaaccggcttcgtccgtggactcataaaccttttccatgtagtccgtatcctgcataacagacttgtacacatcctctgagtcgaaaagatagggcatactgaatatttcgtatacgcctgcaaacgtctcaagattggcggttccggccacaacaaagtcaatggcccctgtctgggtcagctcaatggccttctgggcagaacccaggatttcattggggaatatctggacctcgtacttgtcccccagccgttcctccacatattccttaaaagctaaaagccctatatgctccggatgcgtctctgactgggcatgggatacacggataatccgttttccggaagtcactgagccacagcctgtaagacctgctgccacagcagctgcaagggcggcagccgccactctctttatgaattttctcacttttttcattcctttccctttatacggcaaattcttttgtttcaatacatcccagaaacctgcgttcctgtttattctggactgaaatactgtttcccataccgcaaaacggcggccttttgctgcccgttgcccggctctttcagagtcccggcccttttctccacaacaaaagccccttggctatcaaccagaaaacgttaagattttttggcgccttcttaacactttcttaattatatagccaggggcttttattttgtaccgtaaaagtttgtcatacaggaagaagattttgtccttccccatttttttctagttaccttcgcataaatgcacaaaaaacctgttctatttttgtgcagtctcactatccctgtactcggatggtatcattccggtcatgcgcttgaacacttttgcaaaataattggaatcataataccctacctgcatactcacatccttgacacttatgctcctgtccttcagcagttttttggcctcgtttaccctgaaaccggtgaggtaggaggtgaaattctggtcaaagcactgtttgaacagcttgcagaaataggcgtctgaataattcatcatcctggcagcatcctgcatggatatttccttcatataattattccgtatatactcccgaatggtttccgccacctgggccaggcgtccgtccccgtcatccctgggcatggcttctgcatgttcctcccggcggatgtccggagaaggaacacctggagaaggaacgcccggagaaggaacacccggagaaggaacacccggagaaggaacgcccgaaacattcagccgtttatccgtcagccgcatggcctcctccatgacagccaccagctcatcctcctcgcagggcttcagcagataatccagggcccgtatgacaatggccctcttggcataggaaaactcatcataggctgtcaggaaaataataatacagtcctcgtccaggctgcggatgcgttccgccgcctccaccccgttcatctccggcatggatatatccatgaccacaatctggcttttttcccttttgaatgtctccagggcctctgccccgttcactgcctcgctgatatccaggctgccgcaaaaatgcctcttcagacgcttggccagcgccatacgttcaatctgttcatcatccgccagcaatacacgatacatatacctcatcctttcgtcctgtcatcagggtgtaaaggccatctgcacgaccgttccccgtccctcactgctgtaaatgaaaacctcgccgtcccggtacattccatggaccctgcggtaaatatttcccacgcccacgccggtggccttctcctctccccttgccagggcgaggcgtatttcctccagccgttcctgcgccattccccgtcctgtatcagccaccgatatccagagccgccttccctccatccaggaacggacatgtatcctccccccctgtcccttgggagaaatgccgtggataatggcgttttccaccagaggctgcagggcgaaggagggcaccagcacctccatggtatccggcttacagtccgtgtcatagcggattctctgtccgaaccgcatctgctgcaaatacatgtagtcctgcaccaccttaagctcccgctccaggggcatcacggagtccgtggatttcaggttatagcggaacagcctgctcagggcatggatcatcttctctgtggtgtctgcatcctcaatctgggccgtactggcaatcatattcagtgtattgaacagaaagtggggatttatctggtttttcagcatctgcagccgcacctcgtccagctgcttctccatcctgtgcttttccgtcagggcttcaatatatcccctggtactggctttcatggtgcaaaaggccctgaccaggctggcaatctcatcactgccctccgcacaggtgtccgggcccgtaaaatcattttcccctatccgtctggagtcctccgccagctctaccatggggcggacaatgtttttctggacggaacggttcagccatctgaccatcaaaagggctgccgcgccccacaaaatactgactgccggcacaataatgaacagcgggcgctgcatctcataccgctcattgcccgactgcacggtcatctgttccagacggcccgcatgggttgccagatatccctgaacccggtaaatggtatagaggcggtccagataatccggcgccccttcctccatctccagaaacgcatccctggcagcggcgtaattctcatacatatttaaaatggaccaggtgaccccataacggtccgcaccgatctcctcatagtcaaagggcagggacttaagcgcagagcgggtcctggcgcaggacatctcatatttctccctgttttcaggcgacctgtcccctgcataatactggaaggaactgctctcagcatccatggccgaccagaaggccaggctccgcgaattgcccataagcaaatccccgaatcccttcatgccatagccggcaatcagcatcaccgctgttatggacagtataaccacggcagccgtggaaatggtaatccatctgaccttccgctccagagagcaggacatccaaataccatgcagttttcttccttgccttccttccatccagtctacctccatcgttcatagcttattctataatagtttttaacattttggaagagacaaaccaaaaacatggcggaactttgtatttttgcgcagcaaaaaacgcctgcagccagtaaggcagtctgtatttactgacataggcgttttcctgaggccgccggccgtaagccgcggaccatcacagcagctggtccttttcggaaggcacatacactgcaatatcctcaatatcgcagtccagtatcctgcaaaggtcattcacagtcttcatggatatgtccatgttgtgtttcagcctgtgaagggtactgtccgacacgcggtgcttctttgtaagtgtgtaccaattttcctcagattgctccagtgtcttccagaatggtgaataatctatcatctttatctcctgtatacgctcaagccgccgaagggctggtttcttagatagattaagcataagttagatttcacatcttgaatatcttcgcaattacgaatatactatataaatgtaaatgctgttatttacatatctgaaaggcagggcaaagcaaatggattatttcacaaaagaaggcatgaaaaagcttctggaggatgaagaggtagtccgccgtttgacggagttcatggccatggatggtgcggcctatttcgaggaggtgcgctcccatctgtcccctgaggagctggaagaatatctggatgagaacccggacgagagaatctatctgaaaaaataggtatccatccaatatttccatcacgtaaaagagcggcctgtcaaatgacaaaccgcccttcttcatcttcttcctcaaagtaatccttatagtccacctcaatagaacggcgcatacgtttcatgctgtaataaaggtgttccttcaaggcttcctccagccctttttcatttttatccgcaatcagacggaataaatcctcatgctcaccgataatgcgcataaaatcagtttccgtgataaagtccagcatcctgaacctggtatagtggagctgctgggcctgaagcatctcccacagcttctggcgcctgacagccgcaaaccagatggagtgcatctgcgcgtccatacggtaaaactgctccggctcaaaacccggttccctgataacagccctctgctgcgcaatactgtggcggatgtcctccatgaccatgggcgtctggatttccaggaaatccctgagcaccatggtttccacggccacgcgcatatatatcatctgcttgatgttgtccaggctcagaagagtcacataagtgccgcggtagggaatggtctctgcaaatccctgctcctgcaaaagccggagcgcgtcacgcaccggtgttctggacaccccaaagcgctcgcatatatcattttcactaatcatctggcccggcttaagccttaaatccaggatttcctgcttaagtgtctcgtatacaagctctccccggttcttgaagttcatctctcccatggctggacccccttatcaatacccgcatacagcacaggcataaaatgccgttcttcctatcaaacagtccggccgcatcaaaagctgccggactgccaactggtctatattataaatgattcccccggaaaattcaagccggattatttaggctgcttgccgatgtatgccaggattcctccgtccacatacagcaccagtccattgacgaaattggatgcgtcggaagccaggaatacggcaggtccgcccagatcctcggcctcgccccagcgccctgccggagtcttgctcacgataaactggtcaaatggatgtctggagccgtcaggctgaatctcacgcagcggagcggtctggggagtggcaatgtaaccgggcccgatgccgttgcactggatgttgtactcgccgtactcggaagcaatgttcttggtcagcatcttaaggccgcccttggctgcggcgtatgcggatacggtctcacggccaagctcgctcatcatggagcagatgttgataatttttccgtggcccttcttaatcatgctggggataactgccttggacacgatgaacggcgcgttcaggtccacgtcaataacctgtctgaactcggcagccgtcatatcgcacatgggaatcctcttgatgattccggcattgttcaccagaatatccaccacgcctacttccttctcaatctttccaaccatctcgttgacggcgtcctcactggtcacgtcgcatacatagccgtgggcttcgattccctcttccttgtaagcagccagtcccttgtcaaccagctcctgcttgatatcattgaacacgatggttgcgcctgcgcctgccatggccttggcgatggcaaagccgattccgtaggatgcacctgtaatcagggctaccttgccctccagtgaaaagttatttaaataatctgccatttctttttcctccttgatttgcttatctcatctgattgggcatcatggtgtccatgtcgtcaaactccatgttctctccgcccatggcccagataaatgtatagttggatgtgccggctccgctgtgtatgctccaggaagggctgataacagcttcctcgttcttcatcacaatgtgccttgtctcggtgggctctcccatcatatggaaaaccacgttgtcgcctggaacctcaaagtacatataaacctccatgcggcgctcatgggtgtgggacggcatggtgttccatacgcttccctcctccagcacagtcatgcccatggacagctggcaggtcttaagtacatccgggtggataaactggttgataacgcgcttattggctgtctcagatgctccgcagggcctcttggctgcctttgcaatggggatgtaggtggtggtgtaagaagtatgggccggcgcgcttaccatgtagaacttagccggtgcagaagcgtcgtcgctggaaaaatatacttcctttgttccctttgtgatgtacaggcagtccttatatcccatctggaattcctgtccgtcagccacaatcctgccgcttccgccgatattgaaaataccaatctcgcggcgctccagaaaatagtgagttccgaaattcttccagcagtcaattcccttatctatggaaacagtttctgtggtaggcatacatcccaatgtcaccatacgatccacatgtgaatacacagccactacctcattggccgcatacaggttctgaatcaggaactcatccctcagctcctgggtggtgtaacgctttacatccctctgatttgcagaatagcgaatatccattatcttgtttcctcctttaaacttgatttcctttaaatttagtttcctttaatcttagattcctttaatcttagattcctttaatcttagattcctttaatcttagattcctttaatcttgactttcttttgtgtctacatttgcctttgcgatttagattgcgtttgagtttgagtttgtatttctttccagcaacttgtatacaactttttaaatctgtatacagattaacacagtcgtatatctttttcaatgggcatattctacaaaattgcagtgattttctatgcatgttcacaacagtaaggcttgcgttgtgtgtctgtttattatatacttgaccgtgtttgaccatgaaacattacagcgaggagaatgattatgaaaaaaaacatcctggtgggccagtccggcggccccacagccgtcattaacgccagcttatatggagtcattgcagagggcatggcccggccggaagaggtggaccatgtgtacggcatggtaaacggcatcgaaggcttcctctcaggccacgtcatggacctgtcctctcttacccatgaggacctcatcctgcttaagcagactccggccgcttatctgggctcatgccggttcaaactgcctgaaaacctggatgcgccggtttacagccttttatttgaaaaattcaaatccatgaacataggagcctgtttctatatcggcggaaatgattccatggacacggttgacaagctctcacgatgcgcccggatccgccgtgaatccatctccttcatcggagtgccaaaaaccatagacaacgatctgcctgtgactgaccatacccccggatatggaagcgccgccaagtatgtggcctccacggtccgtgaaatttccctggacgcctctgtgtaccagcagccggctgtcactatcgtggaactgatgggacgccatgcaggctgggtaacggctgccgccgccctggccagaaaattccccggcgacaatcctcttctcatttatatgccggaagtgccgttctccatggaacagttttttaaggacgtggagcaggccctgtcccgccagcccaatgtggtaatctgcgtatccgaaggcatctgcgacaaaaacggccgttttatctgcgaatacaccaatgacgcccagattgacaccttcggccacaagatgcttaccggctgcgccaagatactggaaagctatgtccgcaaccgtttccaggtaaaggtccgctccgtggagctgaatgtaaaccagcgctgcagcagccttctggcctctgccgccgatgtgcaggaggcagagagctcgggcagaacagccgtagaaaaggccctgcagggagaaaccggcaaaatggttacctgttcccgcctgtcagggcccggatatgaacttgaatatggacttacagaggtaggcaatgtgtgcaaccgcgaaaaatcctttcctgtggagtggatcacggcggaaggctccgatatcggaccggaattcctggactatgcccttcccctgattcaggggcagccggaccacatcatggaaaacggactgccaaaatatctctgcaggaagtaagcgcctcagccgtcacaccccggaatatgccgaaaatccgccgtccaccggaagtatgattccggtgataaaaccggccgcctcattgttgagcaggaacatgagggccccgttcagctcctcaggcctgccgaaccgccccatgggggtggcggccagcaccttggcggttctggccgcgggctttccgtcctcctcatagaggaggccctcattctgccgggtcacaaagaaacccggagcaatggcattgacccggattccggcttttgcgaaatgcacggccagccattgggtgaaattgctgagtgcggccacggccccgctgtatacaggtattctggtaaggggcctggccgcgctggcagaggagatgttgatgatattgcatccctcccgtcccaccatatccttggcaaagacctggcaggtcagaaatcctcctaaaaaattcaaatccagcacgccctgcacccccttatactccatatcaaagaaggtagccacatcggcctctatatcccccatctcaaaatattctttcgatgtattagccctggcctggttgcctcccgctccgtttatcaggatatcgcagggtcctaaccgggccagcaccctggcatgaacgctctccagcatctccttatccatcacatccactccataggcagcagccgtccctccagcctcccgtatgtccctggctgtctcctcagccgcctccaggttaatgtccagaagggccactgctgcgccggctctggccagcgtcctggcaaacatgccgcagaggattccccccgcgccggtcaccaccgccatctttcccgtcaaatccgtccccaataccacctttccttcctcctttcctgctctttactttcattcttttcccattcatcctcaccggctgatggacaaaaagggcctgagaacgttcttcccggccctttcctgatttatattgtgttttttgtctgattttgtgctgtacagaccggctgtcaggacattacctgctcattttctccacagcctcgaacaggccattgaggtaggtagcgcctaatgctctgtcatacaggccgtatccggctcttcctgtctctccccaaatcatacgtccgtggtcaggtcttacatagccgtcaaaaccattctccaccagggccttcacgataccgaacatgtccagggaaccgcagcaggacagatgtgctctttcctcaaagccgttatccagcacagccacatttctcagatgcgcgaagtggattcttcccatggcagcgtatttgccggccagtctaaccacgtcgttcttagcggaacagcccagggaaccggtacacagtgtgattccattgtgcctgtcatccaccagctttaaaaacttatccaggttctcctcacaggtaatgattctgggaagaccgaagatgctccagcatgggtcatcctcatggattgccatattcacgtcgcactcggccgcaaccggaataatgcgctccagaaaatattttaagttatcccagagattttcctctgtcaggctgtggtattcctccactacagccttaagtccgtccttggtgtagctggaatcccatcccggaagtgtcaggtcgctgtcgctgttaagaggattcactgcatctacctgctcctgatagtacaccagggaggtggagccgtcagccagctcatggtctaactgggtcctggtccagtcaaatacaggcatgaaattgtagcagatacatttaacacctgcctccgcaacacggcggatgttctcacagtagttctcgatgtacttgtccctggaagccttgcccagctttatatcctcatggacaggaatactctcaatcacatcaaagcccaggccagcatcctctacctgcttcttcagctttgcaatgctctccctgctccacacttcgcctaccggaacatcgtatacagccgtaacgatggactgcatgcccggaatctggcggatattctccagtgttaccttgtcgtcttccccataccatctgaatgataatttcatgtgtaaactcctcctgataagtgttgttttacgttccctaacctatggttttattataacagaaaccatttttccgtccatagtgatacttgccgtccatattgcaaatgttgttgtttcatgctaagatggggataaaatcatgataaatcatgtttcccgagaggagggactcccgtgaaaaaacagctgtccatggactttaacacacggcaatacatgcagtccggagactttgaactcttctattacaatgacactgcgcttaaatccgtagatgcccatgaacatgactactacgagttctattttttcctggaaggcgatgttacataccacatcggtgataaaagctatcagctggaatacggggactgtctgctgattccgcctgatactccccattatccccagttccattcctatgataaaccctaccgcaggtttgtattctggctgaatcaggattaccacaaaaagctgcgccagaccaacgaagatttgacatattgttttgactatgcccagagccaccaggcctaccggttccacacagacaccattaccacccaggagattcagggaaagcttaccgacctgatggaggagcttgcgggcggacgctccttccaccgccttgtctcggagctcatggctgtctccttcctggtgtacattaaccgccttctctatgacagcctccaccagaaatcagctgtctacgaaaatgttctgtacctgaacatctgcgactatatcaaccggcacctggaggaggacttaagcctggacagcctgtcgtcctttttctatgtgagcaaataccatatctcccacatcttcaaggacaacatgggtatcccgctccaccagtacatcctgaaaaaacggcttcacgccagcaagaacgccatattgtccgaccagcccatcagccatgtttacctccagtacggcttcaaggactacaccagctttttcagggcattcaaaaaagagtacggtgtttcccccaaggagtaccgggagcagcaccgcctgcctgaacagcaggattacaccatataaggggatttgactgacatgaatacacctgacatcctttcctttgacacatacagaaactgtatcctctgccccagaatgtgcaaagccgaccgcagccgcgccgcaggctactgcggctgcagcagcgtccttacggctgccagggccgcccttcaccactgggaggagccctgcatcagcggatctgcggatgcaaacggcggtttaacagcgcccggcggcgcccattcggattccggcggcagcggcaccgtctttttttccggctgtaccctgggctgctgcttctgccagaatcataaaatcagcagcgggcacttcggccgggagatgaccgctgaggaactgggccaggttttcctccgtctccaggaccagggggcatataacataaacctggtgacacccacccagtacctgccccatattatctccgccctggaccaggtacgctttaagctcaccatacctgtggtctataactgcggcggctatgagcgtgcggagacagtaaaggcattaaaggattacgtggacatatggcttcccgacttcaaatactatgataaccgtctggcccagcgatattccagggctgcggactattttgagacggccgctgccgccatccggcagatgattgaccagaccggcgctcctgtttaccagtctgtctctcccggactgctggcaaaaggcgtcatcatccgccacatggtcctgccgggacagcgccgtgattccattgccctgttggaatggataagcggcaatctgccccggggccggtatatgatcagccttatgagccagtacactccctacatccaaaaccaggaattcccggaactaaaccgccgcatcacatcatacgaatatgacaaggtggtggatgccgccatccgtctgggactcaccgaggggttcatgcaggaaaaaagcagtgccagggaagaatatactccgccctttgatttggaaggactataaggtattcgggacaaaggtattccggacaaaagtattcgggacagatgaacgggtttcagaacaaaaaaagcgcctgcctcatccggctgcgccatcccgtttttcttttcccctgttccccaaacctgctctctaaagactttcctgaatctcataaaaacatgaagacggatatcgaatctttgactaaccacgttcgcagattacgatatccgtcttctaactatttcgtccattggactaaacctcacttttccgaaacaattcttttaattatttctggcttttctatattaagttgttacaccattctacgttctgttacttcgctcctacttctgcatttcttcacttatgtctgattcatttcttttattgctttttctttactatccggtatcatctttcgttctaataatactttctcgtcatatcaccaaaccgaatttatttttctgatactcttgagatagtgttacaaattcaatcattcatttgtttataaatgcttcactcaacagtctgtatctttaattcatatctttaaataactgcaattgctcttaaaacattcaatctatataacttgtatttcgattattaaattatctgtctgtgaacttacccattcacatattagtttctttaactcatgaaaacctgctacttcttgaattgtttaccaaccgattggattcctgtttctttaaatcaatttcttaaaattacttatctgtttgagcgtttcactttggtagattggtttttcctggtctcatttataattaaatttctttaagttataaatgaaacgaaatttaagtctttggcggtccgtacctcctttgcttggattttattacttgtgaactgattgtctacagttccttgaaatcttttgttctctgttcttttgttgttttcattatagtaaatgcccccgcatttgtcaacacttttttagtttttttattatttttttagtttattaatatttgaatccattttattacaattgtttctatttttatacatatcttaaccttttatttgtgttaattgtttaaatattctgattttttccaaaaaaagatacctattcctaccggatacaggtatctttttcctgttatttactttttatctgtttgaatcatcccttaaatgcttccacttcttccctggagggtatggagggtgctgccccggggcgtgaaaccgcaattgcggctgccttggcagccaggtcaagggcctctcccgcatccagcccctgcaccagcccgccaataaggaaaccggtaaatgtatcaccggcagccgttgtatccgccacaggaaccttatagattccctgtgtcaggattcgttggccgtccctgtaaagggagccgtctccgcccagtgtcagaactatctttgactccggaaatttgtcagaaagcttttggagcagctcctcaccgcttccctgctccccgcatatatctcctgcctcaatctcattcaacaggaaataatccacatattccaggggataggtactgattttatcgtccatgggagaagggttgaatacaagcaccatgcctttttcgcgggctctctccatgatatagccaatctcgctgatttcattctgcagtaccaggtagtcccccttctcaaagtggtccataaccccatccaccatttccctggtaatctgctggttggcgccgccgaagagaaggatgcagttgcccccgtcctttgccttctggataatggcatggccggtctttccatccagcacggatatatactccgtattcaccccggcttcctttaactggcgaatgagaaaatccccgtccccggtgccgatggcacctgcgtgccatacctctgccccgcttttactcagggcaatggactggtttaaccccttgccgcctgaaaacacatgcatttcttccgaggacatggtctcccctcccctgacaaagtggtccacactataggtgtaatctatgttcagtgaaccgtaattaagtatcttcatgattctccttctcctttccattcgtttgatttttattcttccggcaccatcttccccacatcctggggaatccgggtcaggtcccgctccacaatcagatatatcactgcatccggagggttctcctccaaaagcgaccggtcaaaggcctgccagtgataaaagtccacattggcaaagtaccggggcaggaaatccatgagggctgtgccgaaggaatcccgtataacggcaatccgacgcttatccggcgccccgggtgtacttgtatggacaatattcttatccccgtttacatcctgcaccgtgacctcaaggtcttcgtgatacccgcttacaagggcaatctggtcatcgcagtatttctcaggcaggtggaacagattggccaggtcacccggggctcccttgatataatccacctgcacatcctctatgggcagcggtgtccctcccaatgcctcaatgagcatctggcctgccgcgtatcctcctgcgctgttccagtgagtatccgtcttataataccacacataatcccggttcgtgttaaagtactccctagggtccagaaccgtcacatccgagtgctcccgtatgtaatcctccagctgtccgggccggtttccatcccagacccgcttatatgcatccggcatatattccctgtagattccttccttgttgggagcaatcatcatgagaaagggtatgccccggctctcataatatccggctgcctttatgatctgtccgccaatccaggcagcatcgtccgggtaaaagggctgtgttcccagggcatcataaaggctcatgcccccggcaaaaaagtaccagccatcctttcccacaatcacatcctgggaatccgcatagccgaacagctttaaattaatcatggaattcaggctcaggaacaggttcctgaatgccgcatggtcattgatataactgttgaccgcagacggatacgcctcatatgtatccggtgaaaacacgggaaactctgccaggttcctgttttccccggtgcctgtctggctgcctcccttcacaaagggaaacagcaggttgggtatcagaagcagggcccagaaccccgcaatcataatcttcttcatcataggtgctgctctctttccgtatggactaaaatctgaaataaataaaggcctgataggtgctgctgaccataagcaacgttcccagcagcaaaagggctgccatcacagccacatccgctgcggtcacgttctcctcatcaaacagccgggctttgagacggggcatcagctgctggatgggcccgcagaataccactgccagcaccagcagaaacagaatgcggttatccgcaaaaatccgcggattccacagtcccttgctgggaatcagcattgcctttaacagtatttttccgttgtgcagggtatccacccgaaacagcagccagcccactgccaccgccccaagggtgtacagatgattcaggaacttcaggggatttttttctaaaatcctgccaatccacaggcgttccgccacaataagaatgccgtaatacacaccccagcatatgaagttcatgctggccccatgccacagtcccgttgccaggaataccaggaaaagattcacgcaggtgcgcgccagtcccttcctgttgcctcccagaggaatgtaaagatactgcctgaaccaggtggagagggagatatgccagcgcctccagaactcgctgacagaggccgacagatacggataattgaagttctctttgtaggtaaagccgaacatcctgcccaggccgatggccatgtcggagtacccggaaaaatcatagtaaatctggaagctgtacagaatcacggccagccataccgtaaccgtgcccagctgttccaggggcaggtcaaacatacggtccaccacctggccgaacatgttggcaaataccattttcttcaccaggccgtacacaaaacgcttaataccgtatgcgtgcatggacaggctctcctgccggttcccaatctgcggttccagctcatgatacttgacaatgggaccggaaagtatctggggaaacaaagagatgtacagcgccagacggaatacatttctctgggcgggattctccccgcggaaggtatcagccaggtaagagatggactggaaggtgtaaaatgatatgccgatgggcagcgcgatatcccttggagcaaagccctggcgccccagaagggacatggccagttccaggaagaaattgaaatatttaaaataccccaaaagccccaggttgaccaggatgctcaggataaatactgccttcttaagccccttcctttccccgcagccatccagggccaggccaaacccgtagtttagcaggatggaaaggaccaccagaaccacataccgcggctcgccccagctgtaaaacacaaggctggccatgagcagaaccccatttttaagcttcctgcccggtgaaatatagtatatcagggccagggcaggaaggaaaaaccatacaaacgtcagtgaactaaacagcatatttaggaaaattccctttctatcaaagtttatcaatcatgtatcacagagatgcaggctacatggagacagcgtcctgctttggtatcttgcgccgtatcttatggaatgtcaccatatgggcaatggctgtgatggcccatgagacaggataggacagatacagcacgtccagggaacggtacgccgcaaatacggtgaatacccagagcaccctgaatccgcatgcccctgtgagggatacaaacatggggatgatggaatatcccagccctctcaggcttcccaccatgcagtccatgattccgcaaaggaaataggttgtgcagataatttccagcctgagcatcccgtagcgcagcacctccgggtctgaggaatagatatgcaaaagtccgtctcccgcagccacggctgtgagtcccaggattaaacccacggccgtcaccactcccaggcatatgtacatgattttattaatcctgctgtacttcctgccgcccagattctggctggtaaagctcaggttggtctggtacaccgcgttcattgccgtgtagacaaaaccctcgatgttggaggaggccgtgttcccggccatggcaatagagccgaaggagttgaccgaggactgaatcagtacattggatatggagaatatggctccctgcatgcctgcgggaagtccgatttttacgattcgtttcagcttcctggggtgaatccgcagctgctttaaatccagcttaagtgctcccggagcgctcatcaggctcctcaggaccagaaaagcggagatgtgttctgatatgaccgtggcccaggccacaccgtccactcccattcccagcaccaccacaaagaacaggttcaggcacacattcaccacgccggaagcaaagaggaaatacagaggtctcctggtatccccgatagcccgcagaatggctgcgccgaagttatagaccataagtaccggcatacccagaaagtatatcctcatatagaggaccgactggctcaggacgtcctcaggggttcccataaggcgcagcagcgggtttgccagaagaattcccagcaccaccaggataaagccgctcacaatgctggtggtcaccgccgtgtggacggtctcactgacatccttgtctttgcgggccccgtaataccgggccaccagcacattgacaccaactgagagtcccacgaatacattaattaataggttgataagcgaagatgtggatcccactgccgccagagccccgctgcctgcaaaacggcccaccacgatgatgtccgctgcattaaacagcagctgcaatatgcctgacagcatcaaaggaatggaaaataaaaggattttgcccagaagcgggccgcttgtcatgtcaatctcataagactttttcatcttctgttaactccctgtgtcattctttctccatgccagtccatggcatatgttcttatcagttatatcacagggccgcgttttttacaatgggttaaaaggccatgaaaacctgcgaattttcttgacatttcccggcccgtcctttaaaatggagcaagtgataagggagtaattggcatgccccgccctgccgggcatgtaataaggtcaacatactgatagtttctatctggctttatttgaaacaatgagacttatctacagcattccaaggctgtaggtgggtctttttttataccacaatccatatattaaaacatcaccagggaggaatcattatgtcattagctgaactgtttgtcatcgccgtggggctgtccatggacgcgtttgcggtatctgtctgtaagggcctggccatgcccaaaatgaactggaagggcgcccttttggttgggctgtacttcggcggattccaggccgccatgcctttgttcggatatttcctgggttccagcttcagcctggccatacgtgcttacgaccactgggtggccttcatcctgctggctgttatcggcgcaaacatgataaaagaatccttcagcaaagacgaggaatgtccgaacccggatctggatgttaaaaacatggtgcttctggccattgccaccagcattgatgcactggccgtgggcgtgacctttgccttcctgaatgtcgacatcctccccgccgtatcctttatcggaagcgtcaccttctttctgtccgtggccggcgtaaaggcaggcaacgcatttggatgccgctataaatccaaggccgagctggcaggcggcgccatcctcattctcatgggattcaagatactgctggagcacctggggattttgttcgggtaagcgaaacataagtatccggcagaccatccttaccttcccattccgccatacctgcgcaaagacggcggggcagcgtcctctcggaatacgctgccccactgtctttttattatccttttcctgtctgaaatcctgttcccaggctcagaaacttaagccttcctggtctcagattctgacgccgctgctgtccagctggtaaccgtcaatggtgcggttcgtctgcatcactccgttttcagggtccatataataccactgtcccttatattccagccagccggtctgcatatagccgtctgtgttgaaaaaataccacttgtcgtttatcatggcccaggatgtaaggtattcatcctgatacagatacctccagccgcgcatatccttgttccatttgcccagcaggatgttccggtagttgctcatgtcctcctcaggaagcagcatgaaataccggctctcctttttatcctgataacaaaactctaccatataacattgatccagataattataatccccctcagcggaccgctctttttcaacggtctcaggccggattacagggtaatgggtcccttcctttaaaccgtacaccgtacactccagatacttctgggtctcgcccctataggtgacaagataataattcagtgtcacttcattcaggtccacatcacttttgtcctttgtaactgtgaacgtatcgtattccgataccctgtaccccagcagataggacgaatatccgtcataaatcgtggtccttctgctgttaacatccaaatgcagggtaacaggcacctcagtcttatacgaagccgctgcctctgagacaaatgcagctgacacactgagcactgccgccagaaccagcgcgcctaaccgcttaacagacatataccgtctcatccggtaccctcctctcaaacctttggactactcatgatgacatccagggtgaattcccggcgcatccgccagccattatttcaatataatcttcttgaaattcttcttgccgcgcttaacgaccacgccatctccggcaaactgttccctggagaatacggccttgatatcctttacaggatttccgtccacggacacaccgccctgttccacgttccttctggcctcagaacgggaagctgccaggccggacttgttaagaatgcttaagatatcaatggttccatctgtaaaatcctcttctgaaagttcaaaagtaggcatgttctcggtgctcgctcctgccgcaaacagggccctggcgccttcctgcgctttggctgcttcttcctcgccgtgcaccagctttgtaagctcgaatgccagtatctcctttgcctggtttaactggcttccttcccactgatccatctcgtcaatctgctccagcggaaggaaggtaagcatgcgcaggcacttaagcacatcggaatcccccacattcctccagtactggtagaaatcaaagggtgatgtcttctcaggatccagccatactgcgccggactgtgtcttacccatcttcttgccctcagaattcagaagcagggtaatggtcatggcatgtgcatccttgcccagcttgcggcgaatcagttctgttccgcccagcatgttgctccactggtcatcgccgccaaactgcatgttgcagccgtaccgtttgaacagctcatagaaatcatagctctgcataatcatgtagttgaattccaggaagcttaagcccttttccatcctctgcttgtagcattcagcccgcagcatgttgttgacggaaaaatgaggtcccacttccctgaggaactcaatatagttaaggcccatgagccactccgcattgttcaccatcatggcctttccctctgagaaatcaatgaaacggctcatctgctttttaaaacagtcacagttatgctggatgatttcaggcgtcatcatggtgcgcatatcagagcgtcccgacgggtcgccaatcatgcccgtgcctccgccaatcagggcaatcggcttgttgcctgccatctgaagacgcttcatcaggcagagcgccataaagtggcctacatggaggctgtcagctgtcgggtcaaaaccgatatagaatacggcctttccctcgttgaccattttcttaatttcttcttcgttggtcacctgggcaataaggcctctggcaaccagttcttcataaatctgcatggtgattctctcctcttcttactttctttattttaccatacttctgctttcatgcaagggcttgattcttacattttttatacaggggcagcaggggcacagggcataccgcggacacgattttccctttctgaacgaaaaaaagccccgccctttctcaaaaggacgaagcccgtaagccccgtgttaccacctgatgttcacagacagctcacgctgcctgcctcttcgagtactggcgccaggctctggccaaacgcccgtatactctagcacgataacggatgcaggacccgtcgcagcctactaaggctgttatatgaagcagcgctgttgggtgcgaagctcagggatgtattcatgacctgctttccatgcgcctctcatcatccggctgctttctgtctgttcctgcaggctactacttgttcccgtcatagccaattcatgaaattatgaccattatagacagactctcccggtttgtcaagagttaatcagccatatgtaaagggaatcatcagccgtatgcaaagggaatcagcggtgtgcaaaggtaagcacgaacacagctcccagtatcagggcaaatcccagaaaatcaggcagcgtaaaccgggttcccagccagaacacggatatgaccaccgcggataccggctccacgcttcccatgatgctgccctttaagggtccaatcatgctgacgccctgaaggtacaggccaaatgcaatggcagtgcccaccaccaccacgcctgccagcgctcccagtgtacctgcatcccagaccaccccgtaattccagggctgaaccacggctcccatggcaatcccgccaaaaaacatgccgaatcccagcacctggtatatgtcatatttcaggataagacctcccggtataatagtataaatcatggagctcacagctgccaaaagcccccagaacagggcctcccccgtaatgtggaaggaatgtatgtccccgtgggttccgatgacaaaggtgccaaacaaagacagaccgatggctgccagctcaagccccttgggaagccgcagctcccgcatgcacaccactgccagaatcagaatgggcgacaggtactggagtacggttgccgttcccgcgttggatgcctggattgccataaaatatgtaaactggcagaaggtaatgccgaaaatagcaaatgccagcaagtggatggtatccctttttttccggaacaccctcagattctccctgccgtgaagcttaaatcctgccagcaccagtataatgcctgcaaaaaacagcctgacagccaccagccacggcgcctcgattcccttctgttcaaacaaatactgcccgcagcagcccgaaaatccccagcaggttccgcctaccagggccattatggttcccgctgtctgtctcttatcattcttcatctcacacgttaatctcctgcaacagtcatgtatctatttatacttggaaaacaccttattgtcaatattttcgtgggattcactatttacgaatccggttttctatactataatgaagcattgaaatgtatcttacaccgcagtccggtgtttacataatgggaggacgaaaaaatgggattcacattcatcaataagctgcctacgccggcagaaatccgggagcaattcccgctggccccagagctggcagaaatcaaacacgcacgggacgaggaaataaaaagggtatttactggtgaaagcggcaagtttgttgtcatcatcggcccctgctcagctgacaacgaggaatctgtatgtgattacgccggacgccttgtgaaaatccaggaaaaaacaaaggacaagctaattattattccccgggtctacaccaacaagcccagaaccaccggcgagggatatatgggaatgatacatcagcccgatcctgagaagcggcctgatatgtttgaaggaattctggctatccgccatatgcacatgagggtgctgcgggagacaggtttctccactgcagatgaaatgctttatcctgaaaacatgaactatctctcagacatgatgtcctatgtggcggtaggcgcccgttccgtggagaaccagtttcaccggctggtagccagcggctgcgatgtgcccgtaggcatgaagaaccctaccagcggcgacctgacagtcatgctgaattccgtggtggctgcccagcttccccacgactttatcttccgcggctttgaagtacagtgccccggcaatcctctgacccacaccatcctgcggggggctgtaaacaagaggggccagtgtaaccccaactaccactatgaagatttgaagcttttatttgacctttataacaagcgcgggttacagaatcctgcctgcatcgtggacaccaaccacgccaactccaacaagcagtaccatgaacaaattcgtatagccaaggaagtgctccacagccgccgccactccggcgatatcaagaatctggtaaagggccttatgattgagagctacattgagcccggcagccagaaaatcggggaacactgctacggcaagtccatcaccgatccctgcctgggatgggatgatacggagcggctgctgtacgagattgcggataatctggactaggaccatactataacccaaacgaaatatgagcccggaaaagggcctgccatgcgttttgcatggcaggcccttttccattctgtgaaccattctttatatttatgatcacgcttctgtttttgcttctggtctttgcttctggtctttgcttctggtttttttgcttctggtctttgctcccggttttcatccctagctggccagcgccgtaatcccaaagtatgccagcacaatcacacccagaataattctgtaatatccaaagaacttaaaatcatgctttcggacatagctcataaggaactgaatggaataaatagaaaccacaaaggcaatcagcattcccagtatggtatagaaaatctgcggtcccgtaaatacatttcctgccaggaaatacttcacgattttcagcagactggctccaaacataaccgggattcccaggaaaaatgaaaactctgccgcggcagccctggaacagcccaggaccatggcgcccagtatggtggaaccggaacgggaggttcccggaatcaaagccagaagctgtaccataccaatgaggaacgctgtcttggctgagatctgtcccaccttgttaaacctgggattggtacacacgctgctgttctcaagtacaataaaaagtacgccgtatacaatcagggccgctgccaccacataggcgttaaacaaatgggcctccatccagtcatccagcaaaagtcccagaatggctgccggaacacaggcaatgataattttaatccagagggcccaggtggcatccttctgccggctggacttgctggggctaaagggattcagcttgtgaaaaaacatgacaaccacagccaggatggcccctaactgaatcaccaccagaaacacgtccttaaacgcgtccggctggttcaggcgtatgatttcatccaccagaatcatatgaccggtgctgctgataggaagccactccgtgaacccttccacaattcccaatacaatgatttttaacacttcaactaaactcataaattctccttaccgcagacagtctccattccctgacgccttccggcatccggcccctgcattcatcctgccgcagaagcccctgcctgctgtacattttatgtattcttatctatccctatacctgttttatatattctcaatctgccagtcaacaggagtaaggccgtgctctgtcaaaaatgcattggtcttgctgaagggcctgctgccgaaaaatcccctggatgcggacaagggacttgggtggggcgcttccaggattaaatgcctgggattgttcagcattgccttcttggtctgggccggacgtccccataaaataaacaccatgggtctgtcctgctggttaagaatgcctatggctgcatccgtaaacttctcccatccaatgtcccggtgggaattggcctggtgggctctcactgtgagcactgtatttaacagcatgaccccctggtcagcccactttttcagataaccgttattcggtatataacaccccaaatcatcgtgaagctcctggtaaatgttcaccagtgagggaggaatatccacgtccggctttactgaaaaacacaggccatgggcctgaccataattgtggtaagggtcctgccccagaatcactacctttacgtccgccagcggtgtaaatgcaaatgcgttaaagatatcatccggttcaggaaacacccttttagtctcatattcatgctttactgtcttatacagttctttataatagggcttcttaaactcgctgcttaagggccccagccagtcatttgtaatagcggccatatcctgcttctccttttcaacaatataaattcacattttcatattttagcataggaaacggcaggaaacaacggatatcgacaaaataattaagagagccgggattgcgcccgccctacatccttacggcaatccctctctcccacaggtacttcttaagatcccgtatctccagttccttataatgaaacagagaggcggccagggcagcgtccgctccgccctttgtcagcgcatcatagaaatgttccttatttccggcgcctcccgaggcaataacaggtacggatacatgggatgctataagtgaagtcagttcgttgtcatatccgttcctggttccgtcgcagtccatgctggtgagcagtatctctcccgctcccagacggtctgcctccatggcccactccagggcatcggtccccacatccacacgtccgccgtgcttgtaaatattccagccctttccatcagccctgcgcctggcgtctatggctaccaccacacattggcggccgaacttatccgccgcgtcactgataagacggggattgtcaatggctgaagaattaatggatatcttatccgcgccttccctgagaagcatgcggaagtcttccactgtacgtatgccgccgcccacagtaaacggaataaaaacagtctccgccaccttgcgcaccatgtccaccacagtacggcggttgtccgaggatgccgtgatatccagaaataccagttcgtctgcccctgccctgtcataagccgcggctatctccaccgggtcccctgcgtcccgcaggttcacaaaatttacgccttttaccacccgtccattgttcacgtccaggcatggtatgattcttttggtaaacatatcgcctctcctatctcctgttttaattggtatggcgctgcctccggtatccccgttcagacagcgcaggacttttacagtccgatgaaattcttaagaatggcaaggcccacctctccgcttttctccgggtggaactggcatgcaaacacattttcccgttcaacggaagcgtggattacggtgccgtactccgtggaagctgccacaatggactcatcctctgccttcaaataataggaatggacaaagtaaacataggatccgtcctcaatcccgcggaaaagctttgcttccggccttatcttcagtgaattccagcccatatgcggaatcttaagtccgggatgctccggtatcttaagtatctttcccggaaggatgcccaggccggcagccccctggcactcctcactgcccgcaaatagaagctgcagtcccaggcagatacccagaaacggagttccctggtccactgtctcatgaatcacatccaccagaccatactgctccagctttcccatggcatcgccaaaggagcccacccccggcagaatgaccttgtccgctttgagtatcgttttcctgtccctggttatgacaggcgtttcccccagtgaaagcagggctttttccacactgcgcaggtttcctgcgtcgtaatcaataatggcaatcatacattcaacctcgttcctatgatttaatattttagcattgtaacgtgataaaggcaacttgtttttataatcacttaaatatctgccagtccgcgaataaaggcaactgaatctgcctggattcccgcggcccgctctcccgtttccttgggtatctggaaaaaggtttcatgtatcctgtaaaatactgatttctggttgaaaaaacctatcttctcaaatggccaccgcataacggtaggtgtcttaaatccctctcccagttccaggataaccagcctgcggttcagggttcctgtctgccatttcttgtatgcctcccaccttggcaggtagccttcctctatgtaagtctctgcctcaaccgtattgcctgtcaggggtgccctgcaatgagggcagatatcatccggcacctcaccctcttcccatatatccttggtacaggctttggaacactgtctccaatggatatttccgcagggagccaccacccgcgcgctgtcaaaatccgtgtcatagacagctccgtctgtcacagtggtaaccacataatagtccttgtccctgaccaggctccacaggaccgcgtaagcttcccgcagctccttctgtaccggatcccccagactgcgcaggcgcacatctctaccgtcatcccttaatctccactcccctccgatgcctataagtaccttttccgcgccggaaagcgcctctaacaaatccttcttctgctggtccatatccaatcttcactcctgtcattcataaggctgtccggggacccgtgtacctctgatattccgctcctgtccccggcgccgtcttatgctatcatatcataaaatagggcgggcttcaacgctgcctaatcccgtgggagacgggcagaaggatgggcagacagctcttcccggttgcatttttgccggacctgctataaaatatagaaagcaaatacagaaaaaggagcctgtcaaaagccaggccggaatggaattccggcctggcggcacaggtgaagaggtgaagcatcatcatgaaatcagcacaagacctgagacgattactggaatccattgaccggaaagggtatccggcctataaagatacgcggggttcatatgactttacggattatgtactttccatcgaccatgtacagggagatccctttgcgtccccttccaaattaagtgtatttattccgctccagagggccgcctaccccagcggatattttgacgccccccacaagcagactgccctggaggattatctggtcaggcagttctgccaggagatcgccaaatacaattttaaggcaaagggttccggcaaaagcggcctgatagccaccagccatccagggcctgagattctcagccggacagcctgtgaatgcagtattaagggcataacggcccgctttgaggcaggttttccggccaacggcaggaccattaattccggtgaactgattaagatcctgtttgacttcctgcccaggtgcgtcaaaactgtattttactataaaaacaggccggcccaggaggtaaaggccgtgtcagacctggcggaagaccagtatttcatccgttgtgagctggaacgcctgggacttgtctcctttgtggcagacggctccatccttcccagggaaagcggcatttccagccgtcccatgaagggcagcgtccccttccagtctccggattccctcaggatggaattaaaccttccccatggcggcagaattaccggcatgggtctttgcagaggcattaccctgattgtgggaggcggatatcacggcaaatccactctgttaaaggcactggagtccggcgtctacaaccatgtggccggggatggacgggaatatgtcatcactgattccactgccatgaagctgcgggcagaggacggccgaagcgtccagaatgtggacatctccctgtttatcaacgatctgcccaacaaaaaagacacccactgcttctccactgaggatgccagcggcagcacctcccaggcagctgctgtcatcgaagggattgaggccggaagccgtgtctttctgattgacgaggacacctccgccaccaacttcatggtcagggatgatctgatgcagaaaatcatcagccgggaccaggagcccattaccccattcattgagagagccagggatttgtatgaaaaatcaggcatttcaactgtcatggtggcgggaagttcaggcgcatatttctatattgcagataccatcctccagatggactgctatgaaccactggacatcacggataagaccaaggccttctgttccggctacggcgttgagcccatcacctccgcccccggctttcttcttccgtccggcgggcgcaaactgttaagcaataagggcggttcccagactgcaccgggaaattatgcctcatcaaacagggggaattacaggggcagaggcccccgcgacggcggccgcgatgagcgtatcaaggtcaaggtatacggaaaggattcccttcaaatcggcaagtcccctgtggacctccggttcgtggagcagctcattgactctgaacagaccaactccctggcacagatgctgcgctactgtgtggaacaccagctgctggagcggtacacgctaaaggatacggttgccatgctgcttaaggagatacaaaaaggcggactggcagccgtgggagacagctcctatgcggcctgcggcttttccatgcccagaatacaggagattttcgcctgccttaaccgataccgcaattagtttctgccaccaaccgtaatggctttataaaaacagcgcttccgctgcctgcaatggcagcggggcgctgtttccttttactttaccgctgtttattttctttttctgcttcctctaatattccttcccgtccagaatctcctgataatccttcaggttcttctccagcagtgcgggtgtgtccaggttatagggacattttcccttgcactggttgcagtggagacactgttcaatcttcttcattttctcctgtgcgtccgatgtcagccaggctgcggaaggggctctgcgtatcataagggacatcctggcacagttgttgatttcaatgcccacgggacatggcatacagtatccgcagcctctgcaaaattctcccagaagctcttccctgtccttatcaatcactgcccgtatctcgtctgtcatttcaggaggatttcctacgtaagacaggaattcatccagctcccgctctctctgaacgccccagatcggaagcacattgtcaaactgggccaaatacgcgtaggctgcccgtgaattattgataagaccgccggataatgccttcatggcaatgaatcccatgcccgcctccctgcaccgtttaaccagctccagatccttatccgtggccagataacagaatggaaactgcagtgtatcataaaggcctgaatcaattgcctccatggccactgacagcctgtggttggtgattcctatgtggcgtaccttgccctgctccttagcctccagcatggcttcatacagtccagtgccatctcccggccttggacagaaggaaggattatggaattgatagagatccacatggtctgtcctcaggtttttcagggaaatttccaaatcctccctgaatttctccgcagtctttgcggctgtcttggttgcgacaaacaccttgtcacgtattccctcaagggcggctcccagcttttcctcactgtccgtataattcctggctgtgtcaaagaacgtgattccgccttcatatgccttttttatcaggtatacggcatcctccttcggtattctctggacgggaagggccccgaacccatttttgttcaccgttatacctgttttccccaaagtaacttccaccatcttatgtacctccttcaagcctgctgttttttattattctaccataaaactgctgccatctacaacagaaggactcaaacaaacataaaattgtacgctgttttgcccccacgtcccgtatatccggcgggttggatatcctgctggtaaacacactgtttccacattcccggatttgtgatagaatggataaaacaaagcggcaaacaagaatgcctttggcagatacgccgggaacagctgattgaacgcagcagggaggttaagcgatgaaacatattgggattctttgcgccggcgatacggaactggccccttttttagaacatatgaaagggcagcaaattacagaaaaggcaatgcttaaattccatacgggaaccataaatcatgtgaatgtgtccgccgtatacagcggcgtctgcaaagtaaacgccgccattgcggcccagcttttgatcgatatgttccatgtggacttaatcatcaacgcaggaaccgcgggcgggatgaaggaaggggtgcagctttttgatactgtaatctcagaacgggtgatttaccatgatgtggccgatgatattctgacggactttcacccatggctgaaatcaaattattttttagcagatcaggagttgtgcgccatagccagagcgtatagccggacgtcaaaacatcctgttctgtttggaaccatggttaccggggagcaatttattgaagatgaaaaaagagaggaaatcaatcagaaatttgaccccctctccacagacatggaaacagccggcgttgcccatgtctgctatgtaaaccgcattccatttctggcagtgcggaccattacggataccgttacgcatcagggcatcgaaacctttgaccagaactgcgaagcggcctctgaaatatccgcggagattgttttaggcattcttgggcaattagattaggaggtataagggcttatgctgatacaaaatgggcatcaacaattacaggactttacgaataagaactataaacaaaccataactgaagtgacaaagggcgtatggtttgttttgggattgggacacagcaacgccatttttattgaagcgggttccagcgttattttgattgacacattggatacacgggagcgaggggaacagctgctggacctgatccggcaaaatacaaaaaaagaagtcggtacaatcatctacacccacggccatcctgaccaccggggcggcgcaggagcttttatggatagcaggccggagatcatcgcctttgcgccggcggccccagccttagaaaaaaccgggcttttacaggatattcaaaatctgcggggggcacggcaatttggctatccccttaccgaccaagaagcaatttcacagggcatcggtccccgtgaagggattacccacggagaacaccgtgcctttgttttgcccaccactctttatgaacaagacaaggtaagccgtgaaatcgacggcgtacagttggaaatggttcgtctccccggagaatcggaagaagaaataatgatttggctgccgcagaaaaaggtgttgtgctgcggggataatttctacggctgttttcccaacctctatgcgatccgcggagggcaataccgtgatcttgcggcatggattcacagtattgacgtactgatgtcctatccggctgagtgtctcctgccgggacacacggcggcgattctgggacatgaaaccatcagcagcaccttggggaatttcagaaatgcatttgaatatattctgacgcaaacgttggagggaatgaacgcgggaaagactgcggatcagttggcggctgatatacaattaccccccgaatatgcaggtcttccctatctggcagagcattatggctgtgtggaatggacggtacggtccatttactcggcttacctgggatggttcgacgggaaccccacgcatttgcaccccctgtcccccgaagaacattcacaaaagatgattgcgttaatcggcggcatgcagactgttttggacgcggccaaaacagccctttcccacaaagaataccaatggtgtctggaactatgcgatttacttttatccaatgggaattcagcaaaagagggagtattgcacctaaaggcttcctcgctggaaaaactggcggagtacgaaaccagcgccaacggacggcactattatatggtatgtgccaaagaaatgaacccggaataaattctaacttttttctgatatgtaatcaaagcgggcaagcacagtaggggcttgcccgttttgtctgcccattcagcaggacatgggctttctatacaccctgtctgatgctgaaaccagacctgcgcctgctgcagcggtattttcacggcaacgccggcagagcgcataatacgcttacttcgcccaaagccgtgtgccaaagggtgccccttggaaaacccattccgcctgccggctgcccaatccgaatgtttcccaaattaccgcttatacaggttttcatgtatcatgcgctgagcgtcacgtcccctcctgccagcatttcttttaaatcatctatggtcatgtcccgttcctttaacatctcgttgaccaccttaaattcctccagctggatatgttccatcagtgccttttccttttctctcatggtttccagacagctttcatactgtgctatggatgcttgtacatccgccagctctccctgcattttttcaaccggtgactttcttactccccgtgccataaacgtgcgctccttttctttttgataatatctggtctgaatctgcttccgggtatctgttcggaggacaggtccatttattaccagtatatgtaagcaaatttcaaaatatacataagcttataaaatccgctccgggtttaggttcgctgtcccgggtcaggtaagctctccttgcagccggtaaatcaacggaatcatccaaagcccggcagctccggtaagccggacaaaagggcagccgcagagggcagataaaaagagacccataaagagaggcccataaagagaagcccatgcaaacatctgtttccgcctactcgtcttttggaaaatttcatggtataatacttccatgacttccatgtgccgctatattgccggaaaggaaaacaataatgaatgagacagataaagggcctgatgtatgccaaaaccaagacgaaggattgaacgaaacccagggcgtgccggacggttcccgtgagctttcagacagttcccatgagcttccggatggaatggagattgatatgtcacactataaagaggggtctgccgctgccaaatgcgtactgggagtgattcttctcctgtgtttcatcttcatgtccaggtcctgtaactacagacattcaaccctcaccttttatatgggtccggagccggaggttaacctgggaagccagtattacgaggaaggaagatatcaggaggctgctgattattaccaggaaaaggtggacgaagttttttcaaacggcaagcggtatgaaccggccaacggtccgctctattttaacctgggtatggcatactataaactggaaaactatgaccaggcccttctctatctgaaggagtgcgcggatgtggacaagaggacttccaatacagaagaactggcatgggattataacaccatggccgacgtctgtaaggacgccggccatatggacgaggccctgaactattatgaaaaaggtctgaaggctataaaaaaggcctgcggaaaggactctgagtatacagccatttttctatccgatttaggagacgcgtacaagaaaaccgaggactatgaaaaggccctggagaattatcagcaggccctgaagatccaggaatccaatggaagcgaccagacctggtcctacatccgtatagcaaggatttataatgctttaaaggattatgatgccgcaaaacatttttatggcaaggcttccgggtcggaaacagccgactcctacacaaaaggggtggctttctacaatatgggacagatgtaccatgagcgcggagagtattctcctgcactggccgcccttgacaaggcgctggagtttgttaaccaggatggcgacaatgcctatgctgaatccaatgtccagaataccctggcttccgtatacgctgaatcagaggacagtctggacaaggctatcttgcattctgtcacggcatgccgtctgctggaaacatccggattccccacgcacaactgccgcgaggacctggaacaattcaaagaacagctgaaaggctactaccagacagataccagggatatgacagatgaaggatttgaattatggtatcaggatcaaatggattccgaataaaaccaggaggtaactatgtttaaagactacgaacatcacgcacagtattacgagaccgatcagatgggctgtgtgcaccattccaactacatccgctggatggaggaggcaagggtaaacttaatggaacagatgggctgcgggtataaggccatggaagcatccggcatcatgagcccggttctggaggtgcactgccagtacaggtccatggtacgttttgatgaccatgtaaagatacatgtatgggtaaaagaatataatgccatccgcatgacccttggttatgagatgcgcgatgcagccaccggtgaactcaaaaccaccggcgagagcaggcattgtttcctggatacaggcggcagacctgtatccttaaaacgttcctaccctcagtgggacaccgcattctgcagcgcggtccaggcacaggattcccggtaatgacggcatctgtaggcgatgctgttatccaaagggattatcctcacatgtatatatgtaattattaagacaggaaggctgactagtttatgacaaaatcaaagaatatccgaatattgataatatccattttatgtgcaatatctcttttgctgggaggatgcacggattcctccccctctttttcaccggataagggttcatccataaccgcgccatccggttatggactggctgtgcattttattgatgtgggccagggcgacagtatactggccgaatcagacggacactacatgcttattgatgcaggtgaaaatgaccaggccggcaccgtaatctcttatctaaaagcacagggcgtaacaaagctggactatgtaattggcacccatccccactccgaccatatcgggggcctggacaaggtcattgatacctttcccattgacaaggtcattcttccacctgtggagcacaccacaaaaacctttgaggacgtacttgactccattgcctccaggggacttaaaatcacaaaacccacccccggggattcctatgatttgggagacgcctccttcaccatactctcccctgtaaaagactatggcagcgacctgaacaactggtccgtgggcgtccgccttactttcggcgataacagctttgtcatgtgcggtgacgcagagaatcaggctgaagaagatattgtcaaaaacggcgcaatgctaaaagcagatgttctgaaggcaggtcatcacggcagcagcacctccaccagtgacgcatttctgaaaaaggtgtccccctcctgggtggtaatccagtgcggaaagggcaactcctacggccatccacataaggaaaccatggaaaagcttaagaaggcgggctgccaggtactgcgcacagacgaggagggaaccattaccgcattcagtgacggcaagacaattacatggagtaccggcactgccgcggttcccggcaccagcgccggcagcggcggcaatcagacagccgctatcccagatactgacaacggggccgctgctgaaaatgaggccggcaatccctccacacactccagctatgtcataaataccaacacaggcaaattccaccgccccgactgcgcctctgccacccagatgaaacctgagaaccgcaaagacgtgacagcatccagggatgaactggtacaggaggggtatgaaccctgtaagcagtgcaagccttaaaccaaacccacagaaaggatttttatatgaaatatatcatcgaccggctggaagagggtctggccatatgtgaaactgaattaaggaaatgcatctctgttcccgtcagccatcttccaaaggaagttaaggaaggcgacgtgctgagagaagaggaaggcaggtttttcctggattccgaagaaacagataaaagacggcgtgaaatgaagaagaagcttatggatctgtttgaataaaatcaaaaaatgacaaatgactgcgggcccgtattgactagagtgtgtgaagaaatctctgtaaaagcagctcttctatgataatggcagggctgaaagcttctctatgagcgttcagcccttggtttatatataccgcacaatactgcatatgtcaagaccaggcggattcccgcctggtttgaacggtcctggattctcttacatcggcagtcggccctcatacatgaggctcagttccccatatacctggccccagttccggattggcatcgtccacttctttgttgcttcaaatgttgacaagtacagcgcttttaaaagggctgtatcgcttggaaacacgctcctctgacgattcagcttccggtatgtggcgttcaggctttcgattgcgttcgtggtatatataactttgcgtacagtcgttgaaaacttaaagatggggacgatcgcgtcccagttctggtgccagcttttcatggaattcgggtacttttctgaccatttttttgtgccccgctccaaggcttctaatgccttctcttctgttggcgcctggtaaatcgttttgagatctgccgcaaagagcttacggtccttgtctgatacgtattttaacgtattccgcacctgatggacaatgcacctctggtattccgtctttggaaaggcagcggctatcgcttcctttatccctgtcagtccatcggcacagaggagcaggatgtcttttactccacggttttttaaaccgttcagaacggaaagccagtacttggcactctcattttcgccaacctcgatggtcagaacctcttttaaaccatctgaattaatccccagtacaacataggccgccagcttacggatcacgccgttatcccgtacagaatagtggattgcatcgatataaagcaccggatagacatcggaaagggggcggttctgccagtcttcaatctggggcagaagcttatccgtcacatccgaaatgaagccttcggaggcctcgaagccgtagatatcctccagtgtttccgagatctgccgtgttgtcatccctttagcgtacatggatatgatcttctgatcgatatcagagatatctttctggcgtttctttaccacctgtggttcaaaggtggagttacggtcctgtgggacttcgactttcatgcttccatagctgctattcacctgtttggttttatagccattgcgatagtcatcgcaatcggaacgttctgacttgcgatagccaagatgctcgtccatctcggattccatcatctctttgatggtaccgcccagtagatctttgagggcatcctgaatgtcctgggcagattcaatctcatactcctcaagaagctgccggatgatatttcgctttccatccgtcatttgcactttgtgtacagatttcttttctcttgccataataaaaaggcctcctatgatttttattttatcatagaagaccttataaatctttaattacagaaaaactttcacagactcattgactatttcaatgggggcccgcctttctgttatgctcctgttatgttacccgttatactcctgccatacttcctgtcgttcttgccatacttcctgctgtccttcctgtcatacttcctgccgtacttcctgtcatacttccatccattcatccataccctacctgttatccggcgatatcattttcccgtcctggtcaaaccggtattcctttccatcaaccacgcaggttcccacagccatcttcccgtctgttcccaggtaatagagagaaccattttccccgtaccatccggtcctcatgtttccgtcaccgtcaaacgagtaccatacgccgtcaatctgcttccagcatccaatcacacgggttccgtcctcgcagatatagttccagtatgccccattctgatgccagcccgaagtaccggaagcttctcctgccccggaagctgcccggaccgcttcctgttcctgtgtctgagtctgcgcctgggcttgggcctgggtctgggcttgtgtctgggtttttgtctgggcccaggtctgggtctgggtactttccccgcctcctgcatagggacacactccattgggatgcaggtgtgccggatgacctccgcagtggtagtgatagcttcccagcccgctggcattcttgttatcccggtgtcctccgctggcatcggttctgcctgaatgagcctgggcctccattccccacggggcctgtcccgtcattgccgcgcctcccgccagaagcactccgctcatgaccgctgccatccatacctttactgtacgtttcatctcattacctcccgatttcatttttaactctattttaccatgtttttatctgtgtgtaactccgtatttcagcatctttccaggggattttctcattttcaggccatttcaggcataaaaaattggtggaagcacttgcacgtttttcccaatgatgataccataagaaacatatgtaatgaattcaactagtttggaggtttttaagatggaactaatcatacctaaggattacgatccccgcctctccatacgggagacccaggacgcaatcaaatacatacgcgataccttccagaaggaaatgggcagggagatgcaccttgaacgtatctccgctcccttattcgtggaaaagagcagcggacttaatgataacttaaacggcaccgagcgtcctgtttcctttgatatgctggggctacccggcgaaaccctggaggtggtgcattctctggcaaaatggaaacgtatggcattaaagaaatacggctttaagccaggcgagggactttacaccaacatgaacgccatccgcagggacgaggagctggataaccttcactcctgttatgtggaccagtgggactgggaacgtgtcattacaaaggagcagcgcaccctggacaccctgaaggatacggtgcgggagatcttcaaaattatcaagcacatgcagcatgaggtgtggtataaatacccggaggctgtcaaacatcttcccaaagatatttacttcatcaccagccaggagcttgaggacctgtatcctgataacactcctaaggaaagggaaaacctgattaccagggagcacggctgtgtgttcctgatgcagattggcgacaaactggccggcggcaagccccatgacggacgtgcgcctgactatgacgactggaagctgaacggcgatattcttttctggtttgagcatttgcagtgcgccctggaaatctccagcatgggcatccgcgtggatgaggctgccctggaataccagctgaagaaggcgggatgtgaggaccgccgcagccttccctatcataaaatgcttttaaacggcgagcttccctacaccattggcggcggtatcggacagtcacgtctgtgcatgctgcttttggaccgcgcccatatcggtgaagtacaggccagtatctggcccccaaaaatgcgcgatatctgcggggagaacaagatttatctgctgtagccattggctgggagcgtattatggaatcgaatatctcaatcttttttatcatcgaaataatcggtaccgtggcctttgcgtcctccggtgccctggtagccatcaagcagcgtctggatctgctgggagtggtggtccttggcgtcaccactgccgttggcggcggtatgctcagggacatcctactgggcatcgtcccgcccagcctgttcatgaacccggtttacgtgtacaccgcctttctcacggccatggtgctcttcatcctggtgtggctgaaccagcagatactggaaagccggtatatctcggcctatgagaagatgatgaacctgtttgatgccatcggactgggcgcattcacagtcaccggcatcaataccgcggggacagccggttacggggaatatcatttcctttccatctttctgggcgtcctcacaggcgtgggcggcggtatcctgagagatatgctggcaggccagtccccgtatatcctgcgcaagcatgtgtatgcctctgcctctattgccggggccgtgtgctatgtatgccttaacggctggctctccagggatgcctccatgatattgagcgcaatcctggtggtgctcatccgccttctggcgaccaagtacgactggaaccttcccaccgcataccatactaagaacaaataaataaaacaagtccgggccgtaatcattgtacaaaccaatgtaacgatgattacggcccggacttcctttccatgcgcttgtattgctcttataaaacatgcatgaagctcacctctgctgctgtaaatacttggtaatgcttctttggaatatcttcatgctgctgtccacgttcctgttttccatgagtatctttgatatttcaccgtccgccaggctcatgacctgctcatactgctggtatttaggctctataaccccattttcaattacattataaagcaggctgctgttgataacctgctcgccctcgtccatgtcctcctgtataatggcagctgcctgggcggatccggtaacgcttttgagcacagacactccctgggaataccggaatatgtccatctgcatctcttcatttcccgtcagctgtttcagaaactcccacgccagcttttcatgctttgtattgctgttgattcccataagaagggaatccactctggaacggttttccccctccttgcccgcgggaaatgtgatgcagtcccactggaacttggtatatttcttaatccggtaaggatatgttttataggtcctgtactccgcaaaggtcaggggcatgaaagccacgttccccttgttgaaatcctcctgggtcacgctctgtccttggttcaggtcattgaggcgcttcatgtatttaatggcatccaggacatgggagtctgtaaagggaagctgctgctgatccccgtcataaaaccttcccccgctggtgtaaaccgcatttctccagctgtaattataggttccgaactggtccagcagtccgtctccgtttacatcctttgttatcttacggcagatttcatacatatcgtcccaggtccagtcctcccccggcacctcaatctgctctttcgccagaagggacttgttgacaaataaaaggacgggaaccgtttcataaggaagggcgcactggtgtccgtcgtactttcccgcatccagggcagtagtgaaaaaatcattccggttaaacccggcgtcgtgttcaatgagctcgtccaggtttttcatgactcccagggatgaatacaggttgaaatccgtgtccggcaccataaacacgtccggcatctttccctctaaaagctttctggcgcaccactccgagtaatcctccttgctgattccgctgtagtaatgtatcctcaccccgggatgctcctcctcgaactttgctatggccttgtctatcatgacaaagctgctggcactggccacatcccagttgcttcccgtgaacatgccgaattccaggacaatctccttctcatggtacttatatatacatccaaggaagcctgcaaggaggaacacggctgctcccaaccccagtgtccatttccatcccttcatcccaatctcatccttccttctgccaacatcttgacctctcccgatccccgtacactggtccggtcaaatctcatgtgcccagccgctttctcacgttggtctggacagcccagatggccagctgggtgcggtccctcaaatccagcttgttcagtatagtgctgagataattgcgcactgttccctcagacagcttaagagcctcagctatctccctgttgctggcccccacttccacctgggctatgatcttccactctgtctttgtgagctcatccacatttttatcacccacaagtatgctgtaatctgcctgggccatctgcgaaaacagcctcagcaccttggttgcaatatccgggttaatcatagcccatccattatacaccgtggtgatggcattggccagttcatccatggacacgccttttaagagatatccgctggcaccatatttcaaagcattgtaaacgtactcgtcatcgtcaaacgtggtgagtataataatttttatctgaggataattttccttgatgattttcgtgcactgcacaccgtccagcttgggcatccgtatgtccatcagtatgacatcgggtttattcttcctcacactgcggatgacctcctgtccgttggaagccacatccgtaaccattatgtccggtctgctgttgagcacaatctgcaggctctggcgaatcaattcctgatcgtcggcaatcaatactttaatcataagtctccccccatcggattggtattcttgcattaacagtaaatccgtcgctgccgtcaaatgtaacaacgccgctcagcatcttaatcctctccttcatatgctttgttccgaatccgctttttatctccttgcatccgattccgttgtcccttatttgcagaaggatatccgtatcctccttctttatggtaatccatatctggctggcatggccatggcgcagcgcattggtgattccctcctggataaccctgtaaatggcattttcctcgtcctcgtcaaatttcaggttctttacctggcagtcaaaatacacccttgcgccggacacagcgttcatgtccgataccatcttgctgatggcatattccaggctgaagcgctccagggcgtccgggcgcagctggctgactgagcgccgtatttccttaatgccgtcccttgtgaccttggaaataagctccagctggtcctttgtctgctggggcgacgtgcctatggtggccaggcaggcgtctattcccgcagcaattccggtcagggtatgccccagggtatcgtggatttccctggccaggcggtttctctcccgtgtctcagccatcttttccgccatcacggaatactcctgaagctgctcattcacatcctgaagctgctcgttcagggcgtgtatctcgtccagatttccctgctgctggttgatgatgttcacacagtacaccacgaacatgattacattcagggataccaggatattatagctgctgagcagatactgctgggtggttgcattgtaaaatgagatataatcctgtatggaatacaggcggtatgaaatggaaagcagttcgtaatcagccagtataaaactgccgattgccactgccgccagaaaatacctggatttcccgttcttggcatagagaatgacattggaaaacaccagcagcagaattccgttgtaattaaaattcaaaagtatgatgatggcaaaacatatggcaaaatcagccacaaggctgaaaagaatcaccttgctgttgtccggaaacagccggtcccgcacaaacatactgcctgccagaagagccagaaggagggcgcagagccagatgttccagtaaggataccagacaatggcctggatgccgcttaaaaactccctggccacatagctgcgccgtatattttcaattgtggcatatataaatatgctgagtcccatgacagataccacattcagcgccagaatgcccagctgcaggatgcgtacccgcctgttatccatgttcgtatccatcttctcactgccacccgtctatctcaaactcgtggaggttatccctcgtaatcatggtgctgggcatgcttatgtatttctccaccggctccccgtccaggtatcggtatgcggtctcagccgccttccttcctatggaccttgggctctgggcgctggttcctgtcacatagcccacatccaggattgccttgaaatccggagagccgtcgattccgtaaatcaggacgccctcctccctcctggcctgctgcagggctgccagagcccccagtgccgtggggtcattgcctcccaaaatcacgtcaaagctgatgtcacggcgcagcaggtcggccatcacatgggaggacacctcaatctcgcctgccgcagcttccctgtataccacctggtaattgtgattgtccgctatggtgtccagaaagccctgttcccggttggtaatggaggtctgtatggggttgtcaaggatgacgattttagcctcgtcctttcgtttcatcatatccagggcgcagagctggcccgcctggtaattgtccgtttcaataatggaaattacggagtcccggtccttcaccaccgtatccacattgatgatgccgactcccgcctctctgcacgcatccagggccggctgtaccttttcccagtccacgggatttaaaaacagcatctggatgccctcgtctatcatttcctgaatctgttcattctgcttttcctggtcctgaaggggatcccgggtaagcaggatatcgccgttggcttccaccacctcttcaatcccctcattgagtacatcaaaatacggattattcctggtcatataggtggccccgaacagcctggcctcatgctggcgcccgcttgcatccccatggccgcagccccccagcaggagcatggcgcccgctgtcaggattaacagacctgtccctatcttcatctggttcccgcctccctattcttggcttaacttcccggctgccggtcatatccccggctgtccggtcatgcccccggctgcccggtccttccccattatacctcaaagatgcaaatctgtaatatttcataggaactttttataaaactttggtttcgacaaaaagcgccccactgccgtgaaacgcttttgccgtaaaccaggctctattccgcctttttgtttctcagataatccacaaaaacagccaggagaataacagttccctttaccacgtactgccagaaggaatttacattcagcagattcagtccgttgttcagcacgccgataatcagaccgcctatgatggtgcctccgattttaccggagccgcctgccatggaggtgccgcccaccacaacagccgcaatggcgtccatctcggctccgtctcctgccgtcggctggccggaatacatacgggaggccagaaccacgcccgcaagtcccgccatgattcctgaataggtatgtaccaggaatttaaccttggccgtgctgatgcctgagaatctggctgcctgggaattgcctcccaccgcgtagatatggcgccccagctttgtcttattcatgataatggccgtgataaccagcaccactgccagaagtataacaggagtggggactccgcccacatacccggctcctaaaaactgccattcctttgtaaccacacgcacaggtgaaccgcctgtatatacataggccagtccctttgccacattcatggtggccagggtcacgataaaggggggtatggttgtctttgatatgacaacgccgttaaacatacccaccacagtgcccaccagcacgccgcccagtacgcccactgcgatgggaaggccgtaacgggacacgcagccggctgcaaagcagcctgaaagggcgataatggatccgacggacaaatcaatgccccccaggataatgaccatggtcatgccgcaggccaggaacaggttggacgatatctgtctcagcacgttgaatatatttttctgggtcagaaaggagccgctggtctttggaaacacggataagaaaatacacaaaataagcagggccccgatgatgccgatattatccttgaaatattgttttacatttttctgcaatctggttgtcatttgactttcccccttttcttactttgccgccagcttcatgatttgttcctgggtgacgcattcctcatgactgaagcacccggttatccggccgtcgcacatgacatagacccggtcgctcatgttgagaatttcaggcagttctgacgatatcatgataatggacacgcctttcttcaccagttcattcataattccgtatatctcagacttggcgcctacgtccacgcccctggtcggctcgtccagaatcagtatcttgggggcggtggccagccatcttccaatcattaccttctgctggttgccgccggacaggtttccgataagctgttcctgggacggggtcttggtatccatcatctcgatatactgccgggtaatctcctcctccttgtccgcatccacccatatgccctttataaagctcttcagcacctcaatggtggagttgaaccggacgctctgaaccttatacagtccctcctgcttccggtcctcaggcaccagggcaatgccgaacttcatggcatcaataggagatttgatggccgccttttttccatccacgctgatttcacccgtgcagccgggcgtcagtccgaagatacacttcatggtctcgcttcttccagcgcctaccagccctgcaaaaccaatgatttccccctcacgcagttcaaagctggcccctttgaccatctttccgtctgcaatgttttcacattttaaaaccacccgtccgggctccatgtaatccctggtgtaatacttggtcagctcccggcccaccatcatggcaatgagatggtcccttgtggtatccttcaccctctcggtgcccacataggttccgtccctcagcacagtaacccggtcgcagatctgctccagctcgtccatcttatgggatatatatatgattcccacgcccttctttgtgagctctctcatggtgctgaacaaaaattccacttccttgtccgatatggatgaagtgggctcgtccatcacaagaatcctggagtgataggaaatggccttgacgatttccaccatctgctgctgggcaatggtcaggtccttgaccagcgtcccagcgtcaatgctcatgtggtatgtatccagcagctgctgggcttccttttccatggtctcatggctgacccatagcccctttgacggctctctgccaagaaagatattttccgccacagtcatatgaggtaccagtaccaattcctgatggataatggaaattccgttgttgtgagatgcatttaccccgtcaatggttaccttttttccgtcaataaaaatctcgccctcttctgcgatgtagatgccgcccagaaccttaatcagcgtggatttacctgccccgttttcaccgagcaatgcgtggacctcgccggccctcagttccaggtccaccccctgaagcgccttgactcccggaaatgatttgtggatgttcttcatttgaagcagaactgtttcactcataatctcacctgcctgttcttctattcatatggttcctgacagagtttcctgccgtgcttttgcgttttgagcctgtcagataaaaagtgcctggcccccgcaggggcccagcacttttcagactaatctcttactgccatccatctgtgccatacttatctacattttctgatgtaataaggaaggtttctaccggatatcttgattctaccttatcgccgtttaagtatgtatacatgatattcactgcggactgtgcaatcttaacaggagactgtgcgccgcttccttctatcagggattccccggaagccatctctgccttgatgtcaggagagccgtccacgccgtaaatcatacagtctgtaagaccggctgcgttggctgctgccagtgctcccagtgcagtggggtcattgcctccgaaaatggcaaccacatcgccgtgagcctgcagaagatcctctgcaatacccatggaaacttccagattgcccttagcatcctgctgtgcaacgatgttaaagccttttccttcaattgcatctaaaaatccgtttgtcctgtccgtaacagagttcatggtaggagaatccagtacaatgatatccccgccgtccgggcatttctttacaaggtcctcgccgcagaccttgcctgcgttatagttatcagaaccggtgtaggaaatcaggtaggacaagtccgctacctctgtatcaaatcccacgatgggaattcctgcttccttaagctgatccagagccggaaggattccctctgcctctgccggattcatgaacatggcgtcaatgttctgggaaatcaaatcctctacctgggtaatctgaagagtgacatcattggcgggatccactgcaatcagctcgtcgccgttggcctcaaccatttccctcattctcttctcaatggtgacaaagaacgggttggttccatccatacaggtataaccgaatttgtaatgcttgtccgggtccttcttcttcacatcagcagatgccatatcggctgctgccggagctgccgcttctgtggcttccttgctctcctctgccttctcaggctcagcggccgcctccttggcttcctctgtggtctgggcctgggttggcgcctcggtggctgctgccgttgtctgggagtccccgctgctgcaccctgccagggcagaacctgccattgctgcgcacatcattaccgccaacagcttcttagtactttttttcataagttacctccttttgcaaaatgttttgttgtttttgctgtaatcaaatcttatcacgcttttctttttaacacatgtgcacaatgtaatcattttcatatgacatttgtcatatttttcatcatcactttttccctttcccgttcagccgccgcaaattttcatcgttttgcacaactgcccgccgcgggatactcattgcacagcagacggaagggcggctcatcctcctctataaccggaaaacggcctgccggcagatagaaccggttgtcccggttatcgtcattacacatggatacctcgcccaacagaaccggccctgtgcccggctccaaatggaagtcgtgatacagataaggctggatggtaatgctctctccgggacacagccgtatctgcgttcccgcgggaaccgtgtactcccgcccgtcactgtgtatccgcacatctgtgtcagccagctcctcctccctgccagcattatatacgcctatgagcacatttcctcctcccctgttgatgatatcctccatcttattccagtggaaatgcatggccgcagactgtccctccttcatgtacagcagcttttccgcatagggtttcgtgtacttatccatggacacattgccgtttctcagggtgatgagggagaatcccaccttgtcaaaatcccccatcccaaaatccgtgatatcccatcccagcatgttgtcccggacctcatcgtattcatggcccttttcgttccattcttccggtgtaaaataacagaacgggggcagtttaaaggagcatctgtcaatcatcttttccatgtccctcaatgccctgttgatttctgaacgtttcatggcttttcctcctttgccgacttactccagatgggagaacaccctgattgtgtggagcacatcctccttcatggcctggaccgcccactgggttacatcgtggaaaaatacatattcttcggctgccctgcatttttcctttacatacatgccgcccgccttggcaaggtacgtgtagtaattaattttcctgaccccgttggcaatgcatttcttaaaatcctcgtcgctgaccccggatccgccatgcatcacaatgggaatgccaatgctttcccgtatcctgcgtatcctgtcaaaatccagctttggcgtggtcagatacagcccgtgcacggtgccgaatgagcaggccagggcatctatcccggtaagcccggtgaacgcctgtgcctgttccgggtccgtatagcagctctccacggcctccccttcttcgccttctcccacacttgagaattcctgccttcccatggctccaatctcagcctccacggaagcgccccagtctccggccatttccaccgcaatccttgtgtttgccgcattttcctcaaagggcagaacggagccgtcatacatcactgaggtaaatcccatttccagggcttccctgaggatttccagtttatcgccgtggtccagatggacgcatacaggcacagaggatttctctgccatcatcaccatcaccggcccgatgaccttaagagggataatggactcatggaccggcgcaaactgcaggataaccggctgtcccagctcctcagccgcccctaatacggcctgaatcccctccagagatgtgatgttgaaggcgccgactgctattttttttgcatctgccaggtctaaaactgctttcattgaaactaacatgttatctattctcctttcttccggcctgggccgggacatacaatgaaatatattccttagtaatggttcttctgcctcttacggaggaagccgcgttttccctatgcggcactccttttgtttggccgcaaagatggttttttttatgtcacggatggatgatgttctgcttctcccatccagcttccatcttctgcctcagctcctcaaaggacagcaggccgctcagggcatcgtaggccgtgacgcaggacgcacccgtggcagctgccagacggatgcattcaaggggcccgcagccgtccagcatggcctttatgaaggcggctatgctggtatcccctgcccctgttcctgacaggatgcagtccggcacgtagctgtcctcaaaatggctgatatcattccatcctgtaaattccggcaggaatttcctccataccggctcaggtgcggtcttcagatacatgccggctgccccgcatttcaggagaacgcatctggtccccatggacagcgctctggcagccaaaggcttaacatcctcctccagggataatatgcctgtgacatcctcgccacctgccttctcctgccatttgcagtacagaggacggtccagcatgtatcccagctcctcaatgcttggcacgaagaaatccacatagggcagcacccgctccagtatccttgcccagtccatgcctgctgcttcggaatccgggtccaccgccaccaggtccagggacgtggtaagccccatggattttaccttcttaaaaagccgtaccagctcctccccctcatccagataaaatcttcgcataatgggaggataaccaaaatgaaaatgtgatgcctcccctactttttcaaagtccacgtccccgcagccaaaggtatcattgcagcccggatcgtgaagaaaaaaacggtccagtcccttgggtgccagtacaatggtataggacgtattctcaccaggaacctggctgatgcaggtctcacagccatgtgcgcttatcatgtccttcagtgcattgccaaaataatcatcccctattttggccatcagaaccacgtctgcacccagacgtttaagacccaggcctgtgttggaaacagctcctcctgtacacatcatggcttttcccaccttaagcagctttcccggctgaaacagttcagagagcttctgcttcccgctgttttggaaaaccggcgtaatgtccagggaaatatgcccggccaccgctacctttttatttccttcttccatcttacttcccccttccgcacccaatcatagcagttttcatgaataaatccaatgctttgtgtgcaattattacataggtaatattttatatgacatttgtcatgtgcatattgcacaacgcaaaatgcactatacaaaaaacaaacgtaataaatcgccgaaaacgcaaaaaagccctgaggggccgtgaatatcacggcgcccccagggctttaaggttatttatttaacccatacatgcagattctaatggcactacggattcaagtggtacttgcgaattctatatttcgattacactgcttacgcgattgccgccgctgtctgtcccctgtcccctgaccactctatggcgtcataggcctgggcaatattcagcatatgatcaccgattcgctcgtagtcggtcagcatttccgaatacaggatggaggactccacattgcagtttccctcccgcatgcggtcaatctgattctgccggaacttgcgggtgatatcgtcaatcctctgttcaatctcagccacctctgacagcggggactgcgtatccccggcagccgccgccttcaaaagctccatgccttcccggcaggtttcctccatgacagcaaattccttcctggcgtaattggaaaactgaagtccttttgcctctatggtttcggcatactccgccaggttcatggcatggtcaccgatccgctcaatatttcctagaatggtatacatccggttcagggtgtcaatatccttgggcgtctggtccagcacaagtatcttggaaatcttctgggacagtctcatattgcttaaatcaatttcctcttcccggtctgcgatggcctggattccctccgaagctccctcctccacagccttgaagctctgggatacattctctgccgcagttgccagcatccccttaatctcgtcatgaatctggttgatcgcaatggtggagataccaaggtggtgcttggaggccataagcccctcaaaccactggtccgcatcctttacaggaactgccttatccggaagaatggcaatggcaatcttctccagaagggcgccaaagggcagaagaatcaaggtggtgctgatattgaaaatagtatggacatttgcaatctgagccaccggattatccggggtcaggcttaccacaaagtccgtaaaaggagtcaggatgcacagggtcacaaacagggccgtaccaatcacattgaacatcagatgaatcagggtggtgcgctttgcattgcggctggttcccacagaagccagaagcgctgtaatacaggtaccgatattctggccgaacagcacgaacacggcactgtgaaggttaatgacgccgcccatagccagagcctgaaggatacccacagacgcagacgaggactggataatggctgtgaataccgctcctaccaggattcccagaaggggattggaaaacttggtcaccatatggatgaaggtttcggaatcccgcaggggaaccatggcatcgctcatcatgcccatgccgatgaacaggacgccgataccggcaataatgcctcccacatgctgtacctttttatttttcgcgaaaatcagggacataacgcccacaaaggcgatgagcggagccaatgctcctatgtccagggcaatcagctgtcccgtaatggtggtacctacattggcacccatgataatccatacagcctgcttaagtgtcataagacccgagttgacaaatccaactgtcatgacggttgtggctgaagacgactgaatcagggctgtgattcctgcccccaccagcactcccagaaaacggtttgccgtaaggcgctccagaatctgcttcatacggtttccagccacagcttccagattggtactcatcatctgcatgccgtacatgaacagggccaggccgcccagcaggcttaaaaccaattctactcccatgtgttttctccttttgtccgaggaaattagcttctgctatattatcattttacggataaccttatgtgttccggaatgattccgggtaaaaatgggcaaaaatatggcatagcccgccatcccaaacaaacgatcgcaggttatgcctcctttatcatattcttgcggcatccgtcacacagggcgtttcccatgatatctatagcctcttttcctgattatttaccatttctttacgacttctttacacatactcattatacgggatatttcatatgtcgtcaatatcgtttcccgccagtaatgtaaagtctatgtaaattatgtgtaaaatttcttctggaaatacatatatttacaaatctccccgcagcagagccgcaccattatccatttattgagtatattgttttttcctgttattatacatgatttttaaaagaccgatggcaagaactgccggtatccagccggctgcggccagacccgccttcaaattacctcctgatgcccctgctatgagtcccaccagcgccggaccaccggcacatcccagatccccggccagggccagcagggcaaacatggcagtaccgccccgcggacagctcacggacgccagcgagaatgctcccggccacaggatacccacggaaaacccgcacagcccgcagccggccagtcccagaacagggctggcggcagtggacgccagcccatagctgaaaatgcacaaaacggcgctgcctgtcataaaggcggtgagacggatgcgctggctgtatctggcatacattgccctggatatgcccatgagaattgaaaacatacaaggtccggccagatctcccactgtctttgacacattaagccctgattcagcaaaagcggaggcccactggctcatagcctgttccgatgcccctgcgcagaccataataaaaataaaaagccagaacaggctgctttttaacagtccccgaatccccatctcctgcccatcctctgtcagtgccagaatgggaacccgcgaaaacaggacagcgttcataacagggactgctgcccagagaagggccaatacccgccagctgttcagacccgctgtctgaaaaaagacagtggacagtaccaccacggccacggacccccagcagtaaaaagagtgcagcaggctcatggccgcatctttgcgggccgttggacaggcttccacaatggggctgatcagtacttctatgatacctccccccactgcgtacagggcaacgcacacaagcagtcctccaaaatgtcccggaaccatatccggcagaaagctcagcccggccagccccagggcagcgaacacatgagccgccacaatgcatgtcctgtatccaatcctgtccacaaaccgcgccgacaacaggtccaccgcaagctgaatgccaaaattcaccgtaaccagcatagcaatgcgcgccagagatatgccatagcttttctggaaagtgagaaataaaagcggagcaaaattattgaccactgcttggaccacatatcccaggtagctggcattcaatgtttggttgtaattatctttaagggccacttatgcggtccctcctccccgtttccttcattccgttttctttattccgtttccttcattccgtttccttcatttcgcttccggcaaccccctaaagcgcggcctcatgctcccggccatagacctcaatctgtgtcagggcagggaagggggacggatcgtctgcctttatgagctgtccgaaggtaagccatgtgatacccctgcgcttcaggctgatgatatgaggttcaacgctcttttcaagctccactgtctcagaggttccgtcggaaaaggtaaaggtcaccttctcccaccagttgtcatgaggaaagtcagcccttgtatagaggacaatctggtcaaaatccacggggcggccaaactccagcgtcatttgggcatcgtcctgcatattgattccccatgactcatatggccactttccatgggacaggtttgccgtcacaccgtcaatggcgttgcgggccgcaaacacagcctctcccctggtttccacattggcgtgggcgtggggataacattcctggcccctgtgctggtccataacgttcttggccagattccggtatgatttaatttcataatccctggcataccgcatagtcagatagtggcgctctcctgtaaatgatttggggttataggatgtcttaccctctgcaaagggaacctcataaaccagctcatttcccgccccatagataaaggcttcatccatggtatcatccacacgtatgatatagaaacggttcttttccggaagagaaaatataatcctgtctccctcctcatactcacccttccatgccagtacggcctgtttcctgcctgcggcctccgcctttaccgcatcgtttttatccttcactgtaatctgcattcccatatatttacacactcctctttccaacaatttcttttgggttctttcattctaccatggagtcccagggaataccatatacaaaaaaggcgaaattttataatattttaagcattagcgaatattctaatatttacaaaaccttcactttttattcatcagaacctgttattgctgatggtataatggaaaaaataatgaatgaaggggatgattggatgaattggaatgaaacattgagaaacaatgtaacccgcgcccaggaactgaaaacgtatatgaggcttaccagccaggaggaagaacacatgacccgaatcctggaacagtttcccatgacagtcacaagatactatctgtctcttattgactggaacaatccggaacaggatcctgtgttcaggatgtctataccctccattcgtgaaaccgacctgtcgggggactttgataccagcggggaggcggataacacagtgctgcccggcctgcagcacaagtacaggcagacggcgctcatcctgtccacccaccggtgcgccatgtattgcaggcattgcttccgcaagcggctggtgggaatctccggcggcgaaacagccggaaatgtggaccagatggctgcctacatcgtctcccaccctgaaataaccaatgtgctcatatccggcggggattcctttctgaacagcaatcaaatcatacgccggtatctggaggcattcagctccattaaacatctggatctaatccgtttcggcacccgcaccccggtggtgctgcctatgcggatttatgatgacccggaacttctggatattctggcccgctatacaaaaatcaaacaaatctatgtggtgacccagtttaaccattcaaatgaactgactccgcaagcagtaaaagcgatccggtgcctgatggacgctggtgtcattgtaaagaaccagaccgttctgttaaaaggaatcaacgatgacgcagggagtctcggaaccctgttaaagaatctgacaagatacggtgtcattccctattacattttccagtgccgtcccgtatccggggtaaagagtcagttccagattcctttgacagagggctgccgcattgtggaagaggcaaaaaacatgcagaacggccagggcaaatgcatccgctacgccatgtcccacgtcaccggcaaaatcgaaatcctgggccaaatgcccgacaaaaacatgctttttaaatatcatcaggcaaaatatgaaaaagaccagggccgtatattctgcgagaaattggcacctggacaggcgtggctgcaggggtgataacagactttgccgcagactgtttcccggcccatgcaggactttgccgcaggcaaatgttaagccgcgggacataccctaacaggggcatgtcctgcggcctttttgtgccgtaggcggctgtatatgtaattacatcagtgacagatacaggttcttgatatcctcaaaggacggatcctttggattgcccgggcggcaggcatcatccatggcggactgtgacaggaagtccacatcctctggcttaaggatttcctttaagtcagcagggattcccacgtcagcggacagtttctttaccgcgtccactgctgctttgcggtattcctcctgtgtcatattctcaacaccatccacgcccatggcaatggcaatgtctttaaacttggttcctgtacatggcgcattgtattccatgacggttggaaggatgatggcattggcaacgccgtggggggtatcatataaagcgcccaggccatgagccatggagtgcacaatgcccagaccgcagttggagaatcccattccggtcagatactggcccaaagccatgccttccctgccctctggcttgttctccaccgcatccctcaggctgcgggcgattacttcaatggcttttaagttaaacatgtcggtcatctcccaggcaccctttgtggtatagccctcgattgcatgggtcagggcatccataccggtagcagctgtcagtcccttgggcatggaagacatcatctccggatcaaccactgccactaccgggatatcatgggtatccacgcatacgaatttacgctttttctccacatccgtgatcacgtagttaatggtaacttccgccgcggtgcctgctgtggtgggaactgcaataatcggcacacacggattcttggtcggagcaacgccttccagacttctcacatcctcgaattcagggttggtaatgataacgccgatagccttggaggtatccatggaggaaccgccgccaatggcaatgatataatcggctccggatgccttgaaagccgcaacgccggtctgcacgttctcgatggtcgggttaggtttgatattggaataaatctcgtaggccagtcctgcatcctccagtacctttgtcaccttgcaggttacattgaacttaatcaggtcagggtcggaacatacaaaagccttcttaaatccccttgcctttgcctcatttgcaatctcctggattgcacctgcgccgtgataggatgtctcgtttaatacgattctgtttgccatgattttcttctcctttacattgacagtacaccgccggacccatcttaagtgtccgtggatttacctggttgcttttgttaatattataacaagtcctgttttaaaataaaagtgacaaacatccctgtctgtcactttcctttaagttttgtgcagtttcaccatttaggattatgcataatcaccatgttctgtctctgctgcggctggggatatccgggactttccggggcttaaagcagtttcaattttccgaacacctctgccagctttggcggcatggcttccaccagcttatccgacatttcccggggtgtgtccttcatgcctcccagaacccacttcaccgtcatgtatacggagccctggcagtacatctccaaaaggaactgaagctcccggcccaaaggctggctggtttttcttgcaatcaggtccgtataaaactggagaatcagttcaaagtcatgttcctttaatgagttcctgtcatcggagcggaacgcttctgtgaaaaacaccttttcattgagaatgaactcaaacttccgggtcaggctctcccccaccgtatgccccatgccaatctgctcaaaagactgaagcaccagcttgtcaaaataccagtttatcagatcgtacttgtccagaaaattccggtaaaaggtctgccgggtcacaccgcagccctccacaatatttttgaccgtaatcttatccacgggcgctgtcttcatgcactccttaacggattcagccagcttgtattttgttttctcctgctttcctgtaacggccatggtattcctcctgcggcaggtactgcacggaaaccctccggtacctgtgtattttgtaacatatccctgcgccacaacaggcagtgcaggcctggttgcgctgcactgcccgctgcttctatggacagtatatcaaattttgagacaggcttctacctgtttttgaaaatgcttaccattgccttccacatctgtaccagcacattccacatccgccttaaggggctttccttggccttttccacctctgcatccgcggtcttggccatgtcgtcgtccacgctgatctcatcggtgcgcatgacaatctgcagtgtcttgggcggtttgttccggtccgaggtaaaggataccttgtctgcggacggatccataaacaggaaacggttatctgtatcaaacttatccagctcattgtcaatggtatccttcatggtacgtccggcctggcgcatcaccgtggtgctgtccaggatgttcaggcttttatccagaagttccatactgccgcgcaggctgtccctggcagccgcgtcaaaatcatcgctgctgtcttttaacgtgttctggatgatagtcagggtgctgattccattgttgagtgcatctgtggtacgccgtaccagttcctgggagtcatccagggcagtctggagatccggataatatacgtccagagaatcattgagggcctttaaatcctcaatcagataatccatattgtcaactatctcggcgctgtatttcgcagaatcagatgtgtcatccatcaggttcgccatcttgtctgtcagggatttgctccgggcagataaatcctgaaggactgccaccttgtcatacagggattgttcaatggctatcgcggcttctgcggcggcctgctggtcgatactgcttaccagagggatgtttttcttctctatggatgcgatggccgccaggcctgccaggccggtgtttcctgtatttatggcagagctaatagcagtgcctgtatccggggtgttactgccggagtttccgctggaatttccgctggaatttccactttctgctgcgcttgcgctgctgctcccggttgcgcttccgttggtgctttcgcctccggttgtatttccgcttccggctccagttccgcttccgtccgtacttgcgcctccggttgtatttccgcttccgctcccggttgtgcttccgtccgtacttccgcctccggttgtatttccgcttccgctcccggttgtgcttccgtccgtacttgcgcctccggttgtatttccgcttccgctcccggttgtgcttccgtccgtacttccacctccggttgtatttccgcttccgctcccggttgtgcttccgtccgtgcttgcgcctccggttgtatttccgcttccgctcccggttgtgcttccgtccgtacttccgcctccggttgtatttccgcttccggctccagttccgcttccgtccgtgcttgtgcctccgtccgtatttccgctcccgctcccagttccgctggtgcttccgtttccgtctgtgcttccgcttcctccggcacttccatccgggttatctttcccctccgtactgccgccggaatttccgctttcctggtcattcccctgattattattctgggagttttcctggctgctgcctccgccggatgacgaatggctcccgccatttgatgtcccgtaatccacatcctccatgtcttccagttcttcctcatccagctcctcgtcatagagccgtctggccttggtactggaactcttatacagactgagatacgtcaacagtgtgtcctgggatgcctgaagctgggtatccagcgcaatgatggattccatggtcttttggagttccggcaaatcgctgctgataccgcctgcgctgttttctatgttcttaagtctggtctgcagctttctcaaagggtcctgcatatctcccagcgtgttgacaatgtcattcatgctgctgtgaaccacctcggcacagtccttggccgtctgcaaatggggaatcatggtgtccatctgctgtgacaccgatgtaagcgctgccagcgtctggtcatttccggccagtatgctgtccttggaattactccacttctgtctggcgctctccgctgagtccataccctggcggacctggttcacaccctgccgcatgttctccacagactttgccatctgctccaggctgtcgtaaagctcatcccctgcatcctgccatgtatccttggcttccttcaggtccttgatatgttccagatcctccaccgtacccggtaccatggccatgatcacgccaatggtctcaaagctgtccgtgccgatgcgcaccgtgtaatccccgtcctccccgggaagggcggtaaataccaccgctgtggtttcacccaggttctgggtctgggacccttcagcctccacgctgtagcatttgctcatatccacgggcacagccaccataagcatcatgttgttgcggtaatattccccggcattgtcattgggctctgccttcacattgatctcaatcagccctgaagctcctgccagcttatcgccgtccatgggtacaccgttcagcttgtaagatacgtcaaagtcccagggcagtaccatcatgcctttatccacagcgcatttataataaaatcttcccctctggtcctccggaagctgccacgtcaccattccgtcccccagcacaggttcgatgctgttagacatgttaatcacattttcataggttccgtaatccgtaaattccgtctggccgttgaggcccaccccctttaccacattaatcttatccaccctgccgtaatagtccaggttcacatacatggtttcatccacgtccacagaaggctgtgctccgtatacaggcgcggtgccagtgccggtgcaaagcatgacaaagaccattcccgctgccatgattctcttatatttcattttcatcgctttccacctccgctggttctaaatcagtccgtttcaatgcggacgccttgttgacaatggtacctattcctgcctttatcagggctttgcgcttttcatggcgccgtttcagatacttctgcaggcggtcccattcattgctggtaataatacggtcaaagagcaccagaagggccggcagcacagtcagcaccagaatcacgctgaacagcgccccccgtccaatcaaatggcccaggtcccctatagccgctgtggtcgatatgaaatgaatgatatatccggccaatataataatggttcccgaagtaaaaatagagggacaggacagcatcagcgcctggatacacgcttccttcttctccagggactttctgcaggacacataattgttggtgagcagaatggaataatccaccgtggctcccagctggatgctgctcactatgatgtaccccataaacaccatggtatcccctgccaggtaaggcatggccatattgaggaaaatcgcagcctcaatgggcaccatgacaatcataggtatggcaaaggaccggaagctgaacatgaccaccaggaacacgcccagcatggataacaagttaaccctggaattatccgccgtaatcgtagtcttgatatcctgtgtggaaggtgtttcccccaccagataggaattctccggataataccgctccagaatatcccgtatttcatccgcgcccttaaatgcctggtcgctctctgtcttggtccgtatgtaaataagcatcctgcagtaatcctttgtgtggagctcactggtaacggaatatggcaggaactcctcgggtattccctccggaagggtattggacatggacgtcacacttttcacatagggaagatcctctatctcatctgacatctctttctccgttacagccgaagtattgggatacatggccagcatcatattgcttcttccaaattcccgggagattacctggtcatccgcatagacctgggttccctcgctggctcccaccgcgctgttgccgtacaggaaatcattcattccctgggccacataagcgggcggcgccagaatcagcataatgataagggatgcgtaacgcaccctgtagacccattcgctgaatttccggaaggagggcaggaagggacggtgcctggtcttatcattccacctggaaaatttgagaatcatagccggcatgaagaacagcacggttataaggctgaacacaattccctttgccagcaccagtcccatatcaaatccaatggtaaacttcatggataccaatgccagaaagcccaccaccgtggtcaggctgctggcaaatatggagttgatagcagcgtcaatggcattgatcatggcctgttcttctgagagccccttctgcttttccctggaaaatgcatccagcaggaaaatagagtagtccatggaggtggccagctgcagcaccatagccacattattggtgaggaacgagactgtcccgataaaaatattcgtgccccggttcagcaaaatagccacacccataaccagcagaaaaaggaatggttccgaccaggcggtggtactgatgcacagcaccgcaaatatcataatgacggcaaccgtaagaatgaggttcatctcgctctccacattttccgtcagggatttgttctgtacagccattcccacataatatcccttatcccctgtaatagctttcatctcatcaatggcctgggatgtcttctttgccgtatccccctggtcaaaggtgatgtccataacagcacatccgtccttgtagtagtcctcaatatccttctggcgtataaaatcctcgcctgaatagatatttaccgtactgtcgcaccaaagaatctggtccaccccgtccactgcttccagcttatccttgtactgctttgcctcatacaggctcacatccttaatcatcagcctggcagtgcccggatagccgaattcatcctccatcaggtccagtccgatacaggatctggccgatgcaggcaggtactccgtcaggtcataattgacatttacaaaaagcatcgctatcagggagaaaacacaccctgccacaaatacgctctcaatccagccttttttatgtatgataaaccgggccatacggaaggaaaacttatccccctcctgcggctcccggccttttaccctgtgcattctgtccttgattctgccaaacagcttctgtcccatatttccatgctccttatgctgccgcccattgcggctgtgccttgcaggccttataccctgtgccgcgcaattctgctgcggtatttctgctccggtatttctgctccggtatttctgctgcggcgtttctgctccggcattaccgctgcgatatttccgctccggcaatttgcttcaatattcctccgcaaaatccttacgctcaccgcatcagaatcaccacaaaatactgcttcccgtccttttccctgtgggccatccccaggctgcggtaatattccagggaatacttccggtcggtctttgactggaaacgtttatccagcttttcctttattttatcaaaggcctctgacgcgtcctcacagtccctcacgtacagctccagacaggaagcactccttctgtagttgataacggagaggtaatcgttaatggtaccttctccgggaatcctgtcatctgcatagccccctgccatggctccctccagcctgtggtccgccgccttgttgagggtcatatccatctgaaagcccgcgtaccggtcatagacacggtgcatatcaccgtcatattcatcctcacggtccggatattcctcaaagaataaatccttcttttcctcattcagctggtcaaacaaatcctgggccatatggtcgtagcatcctgcgtcataagcccctccgcctgtattttccacccagccggccgaaaccagggctccctgtgctgaaaactcgtatttcccgttatccagtatcagctctcccaggttcatgcccccatcttcgtggaagtaataccactccccgtccacttcccgccagcctgtaaccatggccccattttcatccatgtaataagaccttccgtctgcctgcagccatcccctgtgtaaagttccatccggttccagccaataccatattccctctgtctggttccagcccggtatatatgaaacgcttatctcctgcgcctgttcatctgccagagccgtcacgggtccggtcccctcaaaggcccacagagctcccgcagcagccagaatgactgcacatattctatatctcatgccatttgcccccgttccttatatatatatccattatacaccttttatactgttaaacaacgtccattttgttaattgacttttgtttatttattgactataatggattataataaattatggcaaaaatacaatgattaatttccttcattttgatggttaatcaacattttttccatttttgtgcaaaatacaattgttaaatctttgtaaatacacgcaaacccacataaacaaaaggaggaacagataatgggcattgaacctgtggaccgccgggtgcgtaagacccgaagacagcttcgtgaatgtcttataacattgctcaaggagaaaaaggtccaggatatcacggttcgggagctgaccgacatggcggacttaaaccggggcaccttttatctccactataaggatgtgtttgaccttctggaaaaaacagaagccgagctccaggaagatttcaaccaattggtctgtaaacatgacgccgtggatctaaaacagcgcccttctgtcatattcaatgaaatatattccttagtatatgataacgcggacctgattgagattcttctgggggaaaacggggatttgaattttgtaaaccgtctgaaacagcttatacgtgaaaagtgcctgaaggactggatggaggtattccgctccggcaatgcagctgcctttgacgcattcttctccttcatcgtgtcaggatgcatcggcctggtacagtactggctccagacaggcctcaaggaaacaccggaacaaatggcaaagctgacagaacacatcatcaccaagggaatcggtgtcctggaaattgacccctacgtataatgacacctgaactgtgtccaatccctaaagatagagtcatgtgcgcgcagtggcatgtatatccataaaccggatgaatttttctccatgttatgatatgatgggaaataaaattacaacagaaaacaggagaatacaatgaaaacacaaattgaatacagccccaaagcaatggtccgcatccgcaaaggacagggacgttccctgaaagccggaggcgcctggatttacgacaatgagatagagagtgtcaatggagcctttgaaaacggcgatatggtaaccgtggaggactttgacggatatccccttggtaccggcttcatcaataccaaatccaagctgacggtccgcatgatgtcccgcagaaaggatacggtcattgacagcgattttctggaaatgcgggtacgcagtgcctgggactacaggaaggctgtgacagatacctccagctgccgcgtcatattcggggaagccgactttctgcccggtattgtcatagacaaattttcagatgtgctggtggtggaatccctggccctgggaatcgaccgactgaagccggtcattgtggacaagctcagaaaggtcatggcggaggacgggattaccatccgtggcgtctacgagcgcaacgatgccaaggtccgtctgcaggagggaatggagcgccataagggattcatgggagatgcatttgacaccaaggtggaaatccttgaaaatggagtccggtatatggtggatgtggaggacggccagaaaaccggcttcttcctggaccagaaatacaacaggctggctgtccagaatctctgccgccgcattcagccggaacaggtgctggactgctttacccacaccgggtcctttgccctcaacgccggtctggcagggtccgcacatgtgctgggcgtggacgcctcggagctggcagtaaaccaggccagggaaaacgctgccctcaacggcctgacagaacaggttcagtttgagtgtgccgatgtcttcgaccttcttcccaggctggagcaggaaggccgcaaatacgacgtggtcatcctggaccctcctgcatttacaaagtccagaaattccattaaaaacgcagtcaagggctatcgcgaaatcaacctgagaggcatgaagctggtaaaggacggcggctatctggccacctgttcctgctcccatttcatggacccggaactgtttaccaaaaccatacgtgaagccgcgggcaatgtacacaaacggctcaggcaggtggagtacaggacccaggctgcagaccatcctattttgtgggcggcggatgagtcttattacttgaaattttatattttccaggtttgtgaggagaaataggtttaaaaataaaaaatccctgaataccggtatgagatgcaatatgcgccattgccggtatctcaggaatttttcttttattttccatgaacaaaaggcaggaaaaacggataaactataagtagatgatatgataaatagatgcatcattacatgtatatggctgtacattcatgactgtacatttacggctgtatatttaatagaaaggaccggacatgattatactcattatattcctgatactgactgttctatccatcctggtctgctgttttgtggcaggctcaacgccctatgacagggaggccgatgatgaggcgcagctggaatttctccgcaaatacagggagtccaggaacaggtaaaccagccttagtaccgcgaaattccatacttcttattcctcagccgtctgtcctgcttttttatcttaccaatgatacatttccattaaaatggatactaatttgtctgtgcgggtttttatatcttctatcttccactcatcctttataatcacatcctgatttaagtacagaccgtttttatagcctatattctttgttttgtctttcgatgttctgtctcttttctgcttaaaagacatattgtaaagatttggattatagccggtaatggtcaggttgccgatggtatgtacgtagcttgcgcggtactgctttgccagcactgcatccccatttgcgatcatctgcacccatggagctggtatattttcaccttcgggaaaaatatgttcaatcgtccacacgtacttcttactggtatcacgagaccaaagatcaacatagatttctctggtctgatgctttgcttcgatgctgcacaagataaatctggcagcttccggattctcgtcgtatatgggaccacgcagtttttcttcaaacaaggaatccggtgcagatacagattgcagctttttacagatttccgtaacaacagcagcgccgcttaacgttttaatcactgtgataatatccatgaacatctgcgtaagctttctggtattcggaatatctgttacgttacggcgaacaaaaaatgtaatcaatgttttgataattccgtttaaatcggattctgaaatttgaagtttctcctgattagacatcaggtacagcagaagaatatacgacggcgcgccggaaattctgctcaagtcttgtagcgcatctgtaaattcatgtatctcatcactgttgtttacgatcacagaatacttttccgctttcgctgacaggtcctccagaaaaaagctgtagtcatattttatcatcttttcgtaaatatcaagaagtgttgttctggttgcaaggtagcccagataataacgcttatccgttttaggatatggctcattcaattcttcccgaaacgcattgtaatactgtctgaaaaatcgctcctgtacagcgtagtcatcctgacctatacaatttagtatatacttccatttttcgtaactattctccgcgtctgaagcatcctctgcctgggcaatcaatgtattcttgatgagatccagcgcggacaaaggaacgcctctgtggttcagcgattcaaaaagcatatatgcatccttatttgtatccacttcaatccccaccagaacagcggtctcaaatctgcgcacaatgccgaacaaagcgcccacctcagttatattaggatttttgctcctgatttctacaatctcatcatcaataagttttccgaaatgtctgtatgcttttgctatacggcgattaccgaaattaagcggtttggatttctgagccgtgataatcccattatcaaacaagataaaagaaaaatcttcgtcattcatattctgtttctgcagaaaaagccgctgcctatattctgttatctttttaccgtttgcggcaaaggtctgctttttgtttgccaattcacttcgcagatttgccagatcatttctatcgtcatcatccatttcatttttgcgttcagacagcttctcatatagcgcagtcagaagaagcataagcgttgagaagcgctgctgcccatcaataacttcaaggacagttccgttaagagaaccgccatttacacaaatgtaagaccctaggaaataaccatgctcattgtctgtaacatcctcaaacaacgcattccagtcgttaattccccaggtatattctctctggtattttggtattctataaattttatcactgttgatggagaaaatgtctgcaaccgtagtctgatctactgtctttatcataagcaaatccctttcacatggtaataaatcatccatccgcacggacaaccgtatcgctgctttcggaccctctgtatcggcaaaacatgatatacgccttccttgctgatattcctgctggtaattattataagtaataaccagtatgatatcaatagaaacttacagcaataggcattacatcaggggcagattttacggctttttgcaaatcctctctgcttaataaaagaaccagaccccacaagaaagtgaaatccggctcttgtcctctattatttttggcacattaagactccctgatacctttaaaccactttcccatttcccagccagccgtatatcttcccgtggattctccggtgaaacatgtcgattaccggacctaatccaaaggtacatacgatggttcctatgccaatctctccgcctaacaacaccgccagaatcacacacaccgcgtccagtgacaccttggcggttcccagccttatccccctttcatggagggccaccaccaggtcatcggtgggattggtgggaaatacgctaatgatataacaggccactgcaaatgccaccaccaccacgcctgctgccatgatgagcagggaggctgccagcccggttccctgtacaggcgccagagcagtcttccacatatctgtaaatatccccagaaaaaaggacgaaatgaatgtctccagtctgggatatccctttctgataaacgcagtcagaatcaccaccagaacggctgtggcataaatgccaagggatgtattgatccggagccgctcagccagagcaaaattcagggcatcgtatcccccggcgcccaggtgggcgttgatggtcagtaccacacccataggcataatccccacaccgatgccgtaaagtgccaggttacaggcccatgctccgggcgtcatagacttccatttcctcagagtcatagttcatcctgccttatcacaacatcctccagactgctgcgggctgcctttcccctgaaattctccagcatcatatcccggcactcctgtgcaaataaggcatggctgaaatcatttctctcctccccttcaaatttcacctggcaattccggaggactacgtcatcagccctgcgcatataaaatccggaggtcttaatctcctctatcttctgtccgtatcccgggcgcagatcatacatgcccttgggccatttgctcttagatctgaccatcacgcgcacattctcaaatagaatgtcttcaatatggtttcccgggctccctgacaaaaatacgccgttttcagagtcgcaggttatattggaaaaccgcacattagatatgtgaccggatttggtgtgttcatccctgtcatgggtggatatggtaatgggttccgcgcatccccaccagcagtccgcaaaccgccttgtctctatgatgatattggaaaacgaaacattcctcacatttcccccatcccgaatctggatggatattccacggttgctgtcactgatgatgcagttgtccacaaccacattttcaaaatcccccgtcccctctgttccgatttttaaagcagctgaggtagatgtaagggtacatcccgaaataataacatttttaagagggccatactccatattgccggaagagctcttcagacagatacagtcatccgcgcatgtaacgtggcagccgatgatccgcacattagtggaatgatccgggtcaattccgtcagaattagccacattcaaatcatttaaaatccgcaggcctgatatgagcacatcgtcacagccggccggatgcagcgtccagaagggggcattcctcataattacatccctaaacgtaatgtgactgcaatgctccacatagaccagggttgggcgcggataaaagtcgcctgtcacatagtatgggctcacctgcttcacaaaggcataggcatttccgtcgatggcgccttctccggaaatggctatattatccgcatccttcgcatagatgaacacataggaaggcttcagtgtcaccggagttcccacccgctccacaccgtcgtctctttgtccggcgttgggatgaaagtaatgctccaaatcattatgggcctgtaataccgccccgcgttccaggtgcagatccacgttttccttcaagacaatagaaccggaataaaaatgctttccgccctccagaatcaccctgccgcctccggcctcgctgcaggcgtcaacagcagcctggatggcaggcgcatcatctgtgacgcggtccgcctttgcgccaaaatcaagcacattaaaaatcataatcaaacactcctttcccctgacctacacagcaccgaccagtgtcggaatcaccatggagaaccagggcacataggccaccagcatcagtgcggcaaagatagccccataaaatggtaaaataggctttatcatatcctccatatctatacctgccacagagcacccggaaaacagggcagaccccacaggcggggtgatattgccgatacccaggttcatgatcatcatgataccgaaatggatgggatgcatgccaaaacttttcaccaccgggaggaaaataggcgcaaaaatcagtacagccggagtaatatccataaaggtgcccacaaccaggaagataagattaatcatcagaagcaccacgtacggattggaggaaatgctgagcatggccttgccaatggcagccggcagtcctgtaaaggacataacaaaggacatggtggaggaagcggcaatgaggaacataataatagccgttgtctcacaggcatcgcacaatatagctggcaggtcctttatcttaatggtgcgataacacacaatagacaggaacagggtataggccactgccactgcggctgattccgtggctgtaaatataccggaacatacaccgcctactataatgacaatcagcagaaggctgggcaccgcgtcaataaatgtatgtatgaattccctggccggaacagccttggtggttggatacttatttttctttgcaatgacaaaggccaccagcatacaggcaacacaccacatgaatccgggtatgtatccgctcattatcattcccaccacggaacaccctgaaagcactgcgtaaataatgaggattcccgaaggaggaatgataagtccggttggagcagacgcaatattggctgccgctgcgaacttgcggtcatatccttctttttcctccaggggaatcatcacgcctcccacggcaatggatgctgccacggatgagccggatatggagccgaacagggtgctgcccaggatattggtgtgggcaaggccgcctggaataaagcccacgaacagcttggcgaaattaatcagcttttgggcaatccctcctgaattcatcagaacaccgcataaaatgaagaagggaaccgcaattaatgaaaaactgtccacacccgtaatcattttctggctcgccacaaaggtagccaaatccaggtccataacgcaggccgttgtcaggacagacgaaacaataagacttatggatacgggaacactgagggccagcagcaggaaaaacgtcccgattaaaattaaaccaacttgtaccacagacattgtcatgatatgtcgttcctcccattctcattttttgaagcatccgccgggtgtgctgaggggttttgtttttcccgggggcatcccgcagcacattgcacccggtatatcctcaattcctttacatcctcccagataaaaataagggcgtagaagataaagaggaccgcacctaccagcagacagctgtagatatagggcatgggaattcccagggccgcagaagactggtccgcagcggtagcgcatagtctgagaccgcccattatcataaccacgatgcagaatacaatgacaaggcactgcacgcctatgtccacgattttctgcacaggcgcactgacctttttcaaaagtatattgatagacaggtgcttcctctttccgtaagcataggctgcgcccaccatggtggtccagaccagaagatagcgaagggcctcctctgtcaccgtacttggattattcaaaacataccgggtgatgacctgccagcatacagccacaaccatgatgcccatgatagcagtacacagtacccggatgatactgtcgattatatttctcatttccttatcccctcctattcagcataactcagaaaatctgccagatatctggcgttatccctgctctcagcgcagaacgcatcatgctgggactttaccgcctggataaagggcgtcttatcaatttcataaaattggacaccggcttcctttgccccctggatattgcgttccacaatttcctgccacttctcttcatgtttccaaaagctttcatccatggccttgagcaacgcatcccggtcctgctctgacatggattcccaggtcttagtggaaatgattacgatatccggcgtgtactgatgctgggtgtaggtataggattttgccacttccccatgtccgtcatccaccaataccgtctcattattctccgcaccatcaataattccctgctggagggaggtataaacttccccggatgacatgggcgtggccgcgccccccatattacgtatcatttcaatggaggtagggctgtcctgggtcctgattttaagccccttcaaatctgccggactttccaccggtccctctttggtggtataaatggaacgtgctcccgaatcataccagccaatggcaaaaaatccctggtcatatgtggatttgaaaatatcctgtactgcccggctctcctccatcaccttaaaataatgctccgtggactgaaatacataaggcagtgaaaatatggaataggctgggttaaactgttccagcgaactggcgcttaccttggcaatatccagtacaccggctttcaccatctgaatcatatcactgttgccgcccagctgaccgttgggatatatggaaaacgaataccccgtattcttttccatctcatccttcatataagtcagccccacatggaccggatggttttcgttgtgggaatgggccaccagcaaatgcgttccgctgccccctttactgcagccggtcaacgagaccagcatggatgttgccaaaagacagcataaaattcctctcctctttttcatgttcctctctcctgttatctgctgaaattaacatagagcctgctctgatgcgcgtctgggacgcgttctggtacggtaccgtatgaagtgtttacatttttcacttctcatgttatagttctattataattgcaaactctttgaatgaaaattgagttatttggtaaaaacattgcaaatcttggaagattgagattaaaaatcgaagggctttgtgcggatgtgccaaattagaaaggcgcattttatgcaatgcgcccaaggataaatggaataagatattaaacagataggcaggagacttatggttacatcatccaaccgtgaaaaaatgctgaagcattacatgcacaccaatgattttgagctggaccaccacagggatattacttaccctgcagtagaaccccattatcatgaattttatgaactgctgtactttataagcggccatgtggattatattataggagatgagatttatcatctgcaaaacgatgaccttctgatcataccgcccaatgtcatgcataatcccatattcgcagatttccgcgtgccatatgagcggtacgtcctgtggatatcgctgccgaccctgcagcagctggcttccattgatgaggacctgaattactttcttaccgcaaaggggatgaaaaactacctgcttcgacgccataccactgcctggggcaacttccgcaccatcttcacctccttagaagaagcccttggagaacagaagcccctaaggcatgcccaggtcaaggccttcattctgcatctgctggtggaatataaccttgccctcatggaagattccggcacggcccagagcggggtacgtgataatccgctgacagatatcctgcactatatacagaaccatctcacggaggatttgtccatggacaccatttcaggtgccttcatcatggataaatacaatctggcacatatgtttaaggataaaatgggaatctcttactatcagtatgtgcttcagcagcgtcttttgactgggaaaaatctgatactggaaggcctccccgccaataaggcatgttttgcctgcggttttaatgactattccagttttttcagggcgtttaaaaaggagtatgaggtgtcgccggcggcgtttcggaggattcatgaggggatgattgggtgatgcaacatattcaatgatttctcattttgctttttccaaagaacacagtacctcacaataagatatatattatccaacaaagggtagtcgtcattaaagcagtccccgtgcaaacatcaagacaaattcccatatatccgggaatatgcttaggaaaagggatgaaataaatgcctccagatttggataccctattatgataaataagataggaatcacaaccaacaaggtcgtatatatttcactcggcagttccgaatcacttggcaatgccacaatccagcttgcgagtggtgcaagacaagctatgcatgaactcgaatcacttttctctgttctttttcaagatgaattgggagtcgatacttatgtaatagcagatggttacaatatccatgccagaaaaaaaaatcattttagaccttgattagccattacttattgattatcattgatttttttaatatatccaacaatatggagtttttcattaatatgagaatgaaaaaatacaatataattgatataaatattcccaccatacttctcaaaataatatttggaattaccaattttgaaataccgcataccatcacaatggaaatacatcccataaatacagaagctttatccgcgtcctttcttttcttatacaatggtctagaatagtgcctacataacagcataactattagttccgccattactgttgttacggctgcagctgccataccatgtgatgaaattgtaataagattcaatattatatttacagttgcagaaataattgtcgcaatgaaaaatttattctctttacggttagggactagtataccttgagcataataacagctaaaaaccgcaaataccaaagccaaacataagattgaaagtgtcctgccaccatataaatactcacttccaccaattaaccacattacttcagaactcatgcagaataatccggtgacacaagggaaaacaagcatcgctaatgcaattttcagtttatacaataaggtattataagcatcggtatcattgcgtcccaaataattggacagtcttggaatggctaccattatgactgcgtttaataacgctttaacgattgtataaactttagatgacagtgtgtagacacccacctcttcttccgacctcaaaaagcccagaatcgttacatccgagtgtatgtaaacggttaatgcgattgatatacaaaataaatttacaataggttttaaatgttttcttaaattaaaatgatatgtaattcgtatcggtatatattttcttgtataaataatattagatatataagccccggaatttgagaacagcattataatagtataaatcacataatcatttcgtcttctcactaataaaaaaataagcagaacagctaatgtttgaaaaataacatatcgaactgttatgaagaggaaatcctcatatatggagttaatccaatcccttcccaatacacttgtgatgatatttacactaagaatatatatcaaaagaacatcctgccctgaccgcctcataaatattgccgcataaacaaaaaacacatatgatattactaaagaaattaaattaattgaaaaaatttctgatgaaaattgaattaatgtatctctgtcctctcttattcttgccccttctctaacagcatatgttggaacccctagtgccgcaaataacataaaataactgactactgagtcagaaaaactatatttaccaaaatttgagcttcctaaaatcctcgatacatacggaaaagttattaatggaaatataatattgcaacattgttttattatgtttaatatcgcactgattcctagattttttatagtatgttcagtcttcatttattagttatctcttttctaaaacctcaataaccttattataaaactttttttccaaatcttaattttattttagtgacataataataaagcagatacataaccaagattcttattggggttcctattgataacacggacgaataaagcacatcatcaataggcagataaaacaccgtgtatgatagatagccataaagcaataaaccaaatcctaatttcattctgtacgcatttttcttgttatgcatataccccatagtaaatatcattccttgaatactacttaatactatcattcctgtcatcccgaaatcactgtaaaagcgtctgaatgcagtatatatatttcccgtatttaatccattaatactcctaaattccaaatgtctagtaaaactatctccataacccagcagcctgtaaaagctcctgtatatggaataaaaagtttctgacccaatgttttgtgtctttaataaagaatcttttaaaaaaagatcaaaattgcggataggacagctaatatatgttgacaaatagcgcattatattaatatctgctaatgatttatgtcttcccataaacaccataagaaatataaataaaacaataaataatatggccattataattgctgttttacatatttttttatctacatctaatttccatccgtcatacattttccaaaatatgaatagaaaatacataagtgcgctcagaaaaatcagcaaattacctctattggatcttaataccgaaattgaaagccatagaaaagcaattattatatgaataaaatcttttttttcactacattggaaacacttattatgaataaaaatgaacaatgaaataatgccaaatactgccgaatagtttatcatggctcctaataatacaggctcgttcacatcattaaggtattgggaaaaaatatgatacctctgtataatcagtgtgatggttgctatagaatatcccctagaaacgaccatacctcgcatataaacaaatgcccaaatcaatgtcaccatctcaagtccaaatgcagttaaattatatactatgccaggttccaaacgttttctttttatttcaattatttctttttcattcaaagagtactttttacaataatataaataaacaaaccaacttcccgtgaaaaaggatagtatacccattaagataaaaacagttgaccttattgaaaattccgaatagttaaaatcatcatacgtaaacaggccaaaaaaacttgtaaaagtaaacatcaaacacacaataactggaggacacatgatttcccacttgaaaacaacaagtgctataaaagatataataatcaatgctaaaatcaacacaaaatacatatatagttctccctgctgcctgtccaagccgtggcaagacttatacgaatagaattacgcaatatcaaataaaattcaaaaaaattttaactttaaaaacaaaggcgttttctcctgaagacttaatcaactctttatcatcccataatgcttttttatccttaaaacttcttttgtaaaacgcatacttttcaagtaaactttttatgtctggtttaacatttggatagtaattaagcaataacctggccctgtccattctaatattagccctgtctgattttcctgttatctgtcttataaatcttccaaacacatccgctgcagtaacctctcgtataccaactgtattagcatcatgtatacgatagagtatatgtgattcatggtcatagtaaatcacccccgcaatcgttcctacatataaaatccatgcatcgtgattacaatactttaatattctttcaggcggtataggctgtttaataatcaaatccgccagctttccattaatcaaaaaagtacatccacagcactgatttttagatattagtgatgctatatctaaatttggaggcttatcaaaacgtaatccctgtttatgcccatctttaaatatggtgagattggaacaataaagcgcgggaattaccccccccccataaccaatatcaatcccatttttaaccatatttctatttccacaggcaacactattacccgtctgtacacctatactttctattttacttacagccctaagcaatttttcttcaagccatatgtcatcctggtctgcaaacgcataatattcatatccacctacggacgctactgtataaagaatttccataaaacttcttcctgggcgaaggttttcttttccttcaataaatgtaagtttaccttcttttgcatacctcctaagaatctgcctggtagaatctgtagaacaatcatcgcggacataaagatctacctggacacctttctgccttaatatactatcaatctgttcttctatgtaattctcaccattatatgaactcataagtacagcaactctcggaacttcaggtatcattagcacttccccccattccctcttttaatattctatacaaaattcattaacacttttattaaaaagatccagtacccctctcctgcagccttgataagctctttatcacgtagtagagacaacctatctttaaacgatttctgatagtttgcatatttttctaaaaaggccctatcttccggctttatacaagaatattgtcttagtaaccactctgcactcttcttccgcaaattaccgcgcctcgttcctcccttgccatatccaattagtctcccaagtttttcaaatatcgtcactccccttactccaacctcgtttctatcgtgaatacggtataaaatctgtgcatcgtcatcatagacaaccatccctgttaataacgccaccagatatatccacgcatcatgcatcctaaaatctataatttctgctggaggacattctttggatataatttgttcaaccagtgctttattaaataccatagtacagcctgaaatctggtttttactgatttgtcgtgctagacttatgtcaataccctcattgtatcttaaaccttttgaaatcccattttcgtaaataatttgatttgaacaatacaaaacaggtatgtctctgattaaaaatcccatagttgacatcacatctccccttataaaaatgagtgcagcgtccactgaaataattctttattcttaaccttgggtttccaccctaaattccgaattttatttgtgtccataattgcaagcttaaatggaaggtacggaagtaaagccgctttttcgccaaaggtaaccttggtttttcctgaaggcgatagtcccgcaatcaactctgccaaatcacggatgctgattagattttcatcaactgctacattgtaaaatgtactctcccccttttccatcaccagaaacattgcattgaccgcatcagcaacgtaagtatatgttctcattgcgcccccatctgagtgcaggataatatcctgtccgtctaatgcgcatttgatgaattccgcaaaggccctcccgtcatccagaagaattcccggcccaagtgtatgtgataagcgaactccacagaaatcaataccatattcctctttgtaagacgccagcattgtctcacacagacgctttgcttccggatagcatgaacggtaattaagattttgtaatggccccatatcggtttctataatctttttttcgtcttcccattcaccgtaaacttcgaccgtggaaacataaaaaacacgctccgttttatgtattctggcacattccagcatattataagtaccatttacatgagcccacaaggtttccacaggcgttttcttaaagtctaccggagccgccggtcctgcagtatgaaagataaaatctatactaccatcatattcaacagacgcatttacattttgatacaggaatgtgacatttggcaaatctagcaaattctcaaatacctgggctgctttctcttccgatcttgccaaaccaattatacacatatttaagttgtatctcaaatccgcatccactagtgtttccatgatataccttcccaaccttccggttgcacctgtaatcattaccgatttattgcggtacatctgccagtttacagagctaccataaataatatctaaatctcgtctctccatcgcttttcgtcctctcctcctacaatccaaatacatacttgttttcctcaagttcgagcatagctttaaatatataataatcttctggcgttgttatctttaggttattattgttctctacaacaacatggatatcattccccaaatatgtataagccagcgcggcatccagaagtgggaacggttgtctaacaggttccggagtattataaacagtcatgatatttcttaatttaaacgactgtggcgcagtaaggctgtatgtatcatcacgtttcttaaaatcggtgaatacagcctcctgtttatctgtaatcacaactgactcaataacaggttttacagtcatggcacttccatatctctctgccacccgtatgttttcatcgatgatattcatctcaaccaatggacgtacaccatcatgtatcacaatgatatcctcatactgtccccccttatcgataatatacttcagtccatttttcaggcttgtctgccggtttttacccccggcaactactttttctacctttctaaagctatactgccttatcaaatcctgcatatgctctatccacccggaattacatacgataataattttatcaataccctcacaaaattcaaacttttccagagtatatacaataattggttttccaaacacttcaagaaattgttttggcattccagaactacgcatcctttgaccaacaccaccagctaatataattgcatgattcattttttcccctccaaaatgtcacctgattggtctgcttttcgacaaatttgccctcattatttcatgctccggcctgcgttcaaccattggtggtggcatcaaatagttttttccataattacgttccaaaaattcatgatatcgttgattaaccagataccgctttccctccaattccaattctgaataatcatccatataattcttgtcaaatatataactgacacccttaaaggcatcattagaccgatggatacattcttttcccccaaccagccatctctcttcgataacatggaaccattttagctgaattcttttaggtatcaatttacccactatgtgtgttgacagcaacaggaatcggttgagtaatccaaaccgcttgtaatcaatatgtggtttcatcattccttgaaatgcccgcaagataccaatttttatctgctgttgccatcgtttctctgaaatatagtcccaaatcagaatatctatgtatacaatactgtcaccttttttcataacaaatcgtggaaaccacatggtttcttcatcgagataatataccccatacagttttttagtaacttcttttaattttttatattccagtctcatcatagacacatcaatatcatcatcccatggaatcaatttgtgatttcgttccgcacccaataacgctccaccatgtaaagagtaataaattccgttttctctgcatacctggtcaaatttttctaaagctgttataagcagagaatgtacctcctccaacccatagctgacatccaattcgtaacttgtttccatatccatcctttttccaccactatcatcaatccaatatatagacacatccggataagcacattctgatttgtccgtgttatttaagcttatggcctacaaacatctttgcaccatcaggattttcataatcccaaaccctgattaacccatctattccaaccacatcgaaatagtcagccctaatatcgcatatttgacctggaatgcctatatattttttattttctaaataatcagctttccaaataattattttatgattcccatcatacatgctgaacgcgcctggatacggtcttgatacggcgcgtataagacgctgcaccttttctactgattccctccaattgatacaaccatcttccggtcgtcgtgctaacagatatgtcgcttcctcatcattctgctttaccggttttaagaatccttccttgatttgagagagaacctttaaaataagcttttccaaagcatgacacatctttttctccacatcggcagcataatccgtttcccctatttcatattcttcttgtcccaggatatcccctgaatcaattccctcatcgataagaaacaaactgcattttgttttatgaactcctaataggacctgccataccattgccgcccttcctctgaacttaggcaaaggtgtcggatgaaaaccaaccacgcctttagatgcacattccataatcgctttgccgacaatctgcgaaaggccaattacaaaaatatagtcaggagaaatctcctttaagatatcaatgttttcttccgctcctatctgtttgaattttttatgcggtattccagccctttttgcggtttcgtgtattggaaaatatccggaaacattttcacagtaccgctcatctaatgaaaaaaccatattaattggaaatcctgtttcaatcattttttccaacacaatctcgctggtaatcactgaccctatcaaaacacttttcatttttccataccaccatataccttattatccattgtttttgcaaatttttcttccccatcaatcacaacctggattgttttaaacaatatttcaatatcgagaagtacattgaaatcccttacatatttaacatcatatttgatacggtcctcccaagaaatggccgtatttccattcacctgcgccaatccggtcatgccaggacgcattctcaagcgttgcttttgaaatgcagtatacgcagcggcctgctcggcaaacgtaggtcttggccccaccaggctcatatcccccttaaatacattgatcaactggggcagctcatcaattttagtacgacgcagaaaatttcccatcacagtttttcgttcctggtctttagatatgtcatgatttctttctgcatctttatcaaccttcatggttctgaacttcaatatataaaataaacggttatccttcccgatacgttcctgcctaaaaactactggccccggcatggttatctttataagcagtgcagaaatcaataaaatagggaatactaacaccaaccccaaaccacttccaattaaatctaacagacgtttaaccaccagattaattgttctcatttcaattttcatcccatatctcccattaaaacaatcacctaatcgtcctgactaaactaaaggcttccgcagctttaacattcactgccgctcctctaaatctcgctaacgcgtccaatgcctctatagaccgtacattggggaactcctcaagctgcgacttaaaaattttcatggcagatagcttctccttaaccgtatctgttatatcctcgtacacattcggtataaattcatttactgtattcggaatattccaaccggtttcagagagtgtttcataagcatacacactttttaccttgtgtttatactttggtcttaccgctaccattgcagcatccaccaccatttgatggtctatctgcatatcccctctatgcgggatataaacatcgtctggggcgattctttgaatcacatcagatatcctgccgttgaattcaaaacgtggaactgtttccagcatcacagcaggaaaatccaggaagatagtctctttaacaccaagcagcttatctgcagctctcgcttccatacgcccttgtttcacatactcttcctgaaatagtggcatgtatcccctagtcacgatacaaacatatacctcgtctccagctttcactctttttaatatcgttcctcctacacccaatacttcatcatctgggtgcggtgctattactaatactctcatataatatctccaagtcatccaacatcttcagatacggaatggaaacggcttttttcatctctctaaattttatcccattattcaggcagcgctgcacatattccatgaattcaggaaataatgaatccgattcaatggtcactttttttatacctctgcttaaacatatgaatattgtaaccataccccattgaaacttttttttgccttttattgtgtaattaggcatttctccaataatccaattataatcataaaaatgtttcaacatattttgatatagtcttttatccggtacataacatgtccttacatcacaaagctgctcttcccgtctgttgttgcccatagcttcattttctaaacagtttaaatatttgctgtaaatatcaagaaatccctgtttcagtacatttactacatcttttacttgaatatatgaaattacatttcttaaattgcacaccctgcaccgcacagattcaatgccgttacctattaatttatttctatcaacctgaagcaattgctccattctgttgcaatccacatccagcatgatagtcccatgatgcatccctacactctcgttacaaaaatatgctgacccagaaaactttgcaccttttaacagaaaatcattacgacccgatttgtccacattcaaccctaaagatttacatgctttctcaatcaccatatctgacttttttaagtcatacagttccttcggcagaatcattgtaaaacatagattccccatatcctgataaactgctccgccgcctgtcatacgtctggcaagtaaggtgcccaattgttttgccatatctatatttacctgtgtatacatattctggctgcgtccgataaccacacagttttcattttgccataggaacagaactcccacttttcctttgctttcctgaaccataattcgcagacattgttccatagccagattctcatatataatattactgttagattggattatataaatcatttaaatctccgcaaactttatagaaatatctcaactgttatcctttaaaagtatgaccgtatcgtcgggtatgtctttaaaaatatggcagccattctggataaccacattcctaccaatttttacacctatataaacagtcacaccttgtcctattaatgtgttttctccaacaatgacatccccagccaacaccacacctgaagtaatatgacaatggcttccgataatacagccatgggaaataatggctccggaatttataatgcaattactctcaaccttaacatcggaacctataattgccccggccataaccatattcccttcacccaaaactgccgactgttctatgactgcagaccggtgtattacatttggaaatatgaaccctttttctttcagcatttcataaattggtctgcgataatgcgccttatttaaaaaacctacgcaattaacaatttgacggtatccttctgcaaataaatggtctaaatcttcatttgaaccaactgacttaattcccatgatgtctttcacatccttggacttatctactaatccgtatatattcagttcatgccgcgtcttcagaatatcaactgccatttttccaagaccgccgccgccataaatcaacacctgattattctttgtctcctttggttcatgtggtttacttataagtttaagtacatccctttctttaataagtcttgacctgtcaaaaacagttatatccacattatattctcgaatcagcgccttagctttttcagtaatcttgtactcaggcaaattattgtcatccattttccggttggtggcttcgtcacctagcactgccaccacatcaccaacctcaatatcacttccagcttctgcgcataatgtaatgaatccatcacacgatgctgttatctcgctggtctcttttgaggtttcaatcaggcacagtacttgttttttcttaacaaatgttccactatctaccagccatttcgttagagttacataatcatcatttacaccaagtcttggcatttgaattttacattccatttctcaatctcctgattatttctgttgtatctggaataacttgtttttctaactcaataccatttggaattggacagtcttttgcagcaatccgaagatatgaagagccaatcctgcgggttgcaaattccgcgattaattcggcccctattccatttgtttcagagccttcttctaccgtcactatttttgccttatccggtattatctcttttaaatcatttatcggtacggggagaagctggctcataatgattatatctacttggatttcatcttttaacatcaattcctctgctgccgcgatgacctcattaaccatatcaccatatgttatcgcatagtaatctgcctgtatttccttttccagactcatatgaacagtggaataaccatactgattctgttcgaaacatgtccatattcccatattcccgtttctgacaaccgcaatcctggaagaatacatctttttattctctattaccattgtcggtgaagtgattgtagaaacaagattactatatagagtctggggattatgtacaggtgataaggccagcacatgcaggcccggtattcccatcatatacttttccatagactgactatgtgttggtccatatcctctccttgctccagacggtattcttacaaccattggcacatgtacactatcaccacatacccaattatatttaactgcatgattcagcaactgatcaaatcctaaagctataaaatcaccaaacatcatttcacatatgggtatcttccctgtcatagccataccaacgctcattcctacaatgcacgcttcgctgataggagtattgagcactctttctcccgcaagttcagacaccccttttgttgccttaaaagcccctccgtatgggtcccttatatcttcccctaaaaatattacccttggatttgtggatacgatatctttaaatgtttcctgtaaaacttcaatacatttacgattgctttctgtaaaatatgtcgtattcgaaggcggcagtaaaaagttctgattcatatttgattctactttgataatttgttctgattctaacttctgctcttctattttgagttcgttcatgtatctgttatacaatgtctcaacttgtgctttacctaaaacgcttctcacatgctcaacaggatcatcagacatatgcgaagcaacttccttggaatcccttatatcatcacccttactatgagcatacaatctgtaattgtggacaattacccctacaggctttctctcactgtttaaataatcaaatgcagcttcaaaaaaaggcaataattcatctatatttgtacttttgatttcaaatgcttttatattaaatgccttcaaacggtcaactatctttccggacactgcatactcactttttgtactcatggcgtaaccgttatcttctataacaaacataattggagagcctgttactgatgccatattaaagctttcataaacgaccccctgcccaagcgttccgtctcctataaatacaatggtgtttgcatcggacttgtctaatttatgggcataagcagctcctaaagcattggggacaattccgccctgaattccattagaataaaaatttctatagtgtatatgctggcttccccccattccaaaacataaacctgattttcttgacataatctcagctaataatttttcttttgggccaccatatgccaaataatgtccatgacatctgtgattagaaaacactgtgtcattttctttgacattcgccatcacagcaacggcggttgcttcctctcctatgtaagtatgggtcgtaccggataatttattttcagaaaataattttattataaaatgttcaaatgctcttatctcaactatctgttcatagtattttctctctatcatatagtcataacctttcacttacttcatcacccaaaacatctccttatgatttcgagtactacattctgctgttctggtgtcattttattatcgcttggcaggcacagacccctctgaaaaatatccatgccaacatcaacagcggttctctctatgtaagcattcgttttagcccgtccattaccttccttggtaacaaaaccattcattcgatagattggctgcatgtgcataggcttccatattggacgcccttctatgttgtattgggctaatatgtccaggatttctgtcggacaggttttgccttgttccggattatagagaacatcctgctctcctctgacctgtctgcacattgcgtcctcatcaatcagcagacaacttaaccaaaaattcggttcgcttctctcctcgttgtaagggttcatggatacaggcagtcccttcagccctttcttatacctctcataaattgctttcttctgtgctatatgttcctccagaaaaggaagctgtccccgaaccacacctgcaaccacattactcatacggtagttataaccaagttcctcatgctgataccaattcgccttttcccggctctgtgtagaccactttctaaccttttccgcatcctcctgactatcacataaaagcatccccccggaacttcctgtgatgattttatttccgttaaagctaatacagttatagctgccaaatttaccagttaggccgcctttatatgtagctccaaatgcctctgctgcatcctctacaataacagcatcatgtttattggcaattgtcctgatttcatcaatctttccagggacgccataaagatgtgcggttacaatcactttcacatccggataaaactcaaacgctttctccaacgcatctggactcatattccaagtatcgcgctcagtatctatgaatactggcacacccccctcataaacaaccggattgacagtggcaccaaaagtcatatccgagcagaacactttatgtccatttaatgctccttttccaagtccagcaccaccataagctctttcacctgccagttttaccgcaagatgaagagccgcagttcccgtagataatgccactgcatttttacagcccaccttttctgctattatgtattcaatctcattaatgtttctacccactgtagacatccaattcgtttcataagcttcggtcacatatttgagctcacctccatgcattgtcggagaggccatccacaacttagacttaaacggttcaatatttgatgatttggtaaacatgaaatctgacctcctctataatccttttaatttaattctgtatattgttaattaagaatcaagttcgtcattaccttgatacaatcatagctgtagccgctgcttctcccatgcctatcttttgaatattattcacatttctatattcagttttttgacctgccggatgaaacgtgggcacgatatcttccaccattagaacaatatccctgctattttcataactggcctctgccaattcttccaactgctttaaaaaataccgaatatcaaaaggtataggttttccaatatgaatcaatttgttagctgttttcaacatgccttcttcttccatcaatttttcctcgaataacttctctcccggccttaatccggtatagataacctcaatttcctcatccggcttatatccagacagcttaatgagatttcttgccagtgtatcaatttttacgggatcgcccatatccaatacaaagatttccccgccctgggcatatgtcccagcctgcagaacaaggctcacagcctcagatattgtcatgaaataccgaatgatatccgggtgtgtcacagtaaccggcccgcctttttcaatctgcttcttgaataacggaatcacagaaccgttactgcccaagacgttaccaaatcttaccgccacaaactgtgtctcgttccggcctccgcttttcatgtcatctgctaacactttatctatgcaataatccgttatagccgtatcagacgccttattcatatgtgcatggagaaacggaagcagctctgtcctgccctctttggaaatggcatccatactctgaataaccatttcgcataaccgtttgctcgcccccataatattggtcggattgaccgccttatctgtactaatcagcacaaaacgccgggtaccatgcatcaatgccgcatatgctgtcttatatgtgccaattacattattttttatcgcctcatttgggctgttttccatcagcggaacgtgtttatgggcagctgcatgataaacaatctcgggtttatacgtctcaaatacccaattgattcttctgctgtctctgacagatccaattaggacggccaggttcaagttaggatatttccacttcagttcctgctctatgtcatatgcattattttcataaatatctaaaataatcagctgcccaggttcatgttccgcaatctgcctgcataattcactcccaatggaaccgcctccacctgtaaccagaatggtttttcctttgatatgccggaaaatctctttcatatttaccttaatagattccctgccaagtaaatcctccacagccacaggcttcatcctgcttaaggatacctctccattggtcaactgaaaaactccaggaaggctctgtaaatggcaacctgtttctttgcaaatgttcaggatatccctcttatcctccacagatgccgttggaatagaaaacataatttgatccacattatatttcttaacattttccatgatgctgtcacgcccgcccgcaataggaattccttccataagacgcccccacttattaggattatcatcaataacgcatacaggccttgccgtagattcactggagttctttagttcctttatgataacctgcccggcagctcctgcaccgattaccatggcattatggacagcctttctctccttagcccgtctcgcccgttctaacgtaatgaagcgataaacgaatcgtaccgtaaccgttaatgcaaactgcataattgcgccaatcatataataggaaacaggcatgcgttttacaaaaacagtcataccaatcacctgaaacacagtagtaatcaacgatgccgccaacatatgatttaattcactaaagctggcaaatctccatagcgtattatataaatgcagcgacaaaaaaaccgtgaccgcgaatgttgtatagaacggtgcaaatactaaaaatgaatatatatactcttctggaatctgagaaaagcgcaaatcgaaccgtaaccaaagacccaaaaaatatgcaaaattcatagctccaacatcataaatcagtaaataaaaggcgatgattttccagtgctcaatttttttttgtttttttacgtataaacgtatatcggcttctattttctctttgaattgattgaccttgattttattcatgattactcctttcccattctgatgcagtttataataagccgtatctaaatgagaaatatgaattttgtcatattcttatttcgatgaaatatgaatccttgttattacttatttcaccaaaataaatacatgacgtttcttctcaaccttgccagatatctttttctcttttacagaccgggggccggcctccgccatctatcacccccggccagcacttctcaatgctgctgctacttatacactaccgataacgtccccgatcccggaacattcacagccactgtcttagtcaccggatccaccttaacagccggaatcagctgccactggcctgtggcattgtcatagaacaataactgtacgttattgacattcgcaaccaggttgggcacatacagagaaacctctacgggacctgtcttaacagtgcctgtattagcatcctttgtgatgattgcatgggttcctgtcagggcattaaagcctgtcaagtccacgccctgaacaacctcgtttaacggttttcccgcattgatatcattaatagccgataccacatccgatggaagtcctgcagttgctgctgtgctgtctgcaaatgcaacagcggtgtcaccgataacagcctctcccttggaattggttgttacctgctgccctgtggttgttacagtgtccaccgcaacgccaatcgtgctgccggtctggctggcactggttgtggcgcctgtcgttttgacacctgtagctgacacagttaccgtggtgttggaatttgtgcttgtagtgcctttgttgctgctggacgatcctatggaaccgctgccatcactgctgctggatgaaccaatggagccattgctggtaggactgttggctgcaaatgcccatacaggctgtgatgccagagcaaccgtcagcactaaagctgctatgcatttctttttcatatccttcacctctcctttctctcctaagagtagttatattcaataaacagcatggtttcatgctggatattgcatgtttgcacacattcaccgccagataccgttcttcttccttccaacggcaaatactgtggtccttcatccctgtctattcaatttcccggtagaacaactccagtaaaatagggatcagtgcttccctgtccgcataaaattcgtcaaagcggagtgtcaccacaccttccccgggtactgtataaaaatcctcatcgcccagttttccgcctgtgacagcgtccatagcaactttaagatactggtccttggtcatgttagtgaccatgtaatcctgaatcctctcaaacagcctgaccacaaggccgctgtccttggccgaatgcctctggaccgcctggaaaaacccctttatatattgttgctgctggtccatacgatacaaagccgaatggtccacattcacatcccggtaacggacaaatacttctgcctgtttccctttcaacgtcactgtttcaccctttaccagagcagggtcccgattctccattccatctgtctcaatcgttaccgtaactccccctacttcatcattcagcacagggataacacttgtatcggctgccagataccactctatcttcaggccccccaatagttctgatactgcatccaccatatattgacagctcttctctctcccatcaccataggcgtaagccagcgtcaggtgctgcatgtccttccccagttcattcccgctcaaatcagtaagcgtgatatctgtcatcgtgtcacgcggtatcatcaatatctttattgtattcctggccgtatcctgggcaatcagaaataccccgtccgcctgcccgccaaaaccggtggtggttttctctgtcatttctcccgaccggtccactccaatacacaggatagccttcacataactgctgcgcctgtaccgttttccactatattcaaccacatccccgccaaagaggtatgtgtcccactgcccgcagtcccggctgcttccctggctgttccctcggctgcctccctggctgtccccctggctgttcccttggcttcctccctggttgttcccctggctgcttccctggctgttcccttggcttcctccccgccccacataatccctggctgcaatctcagcttcgaggagtttcctattgcggtacagattcaccccggcccatatgaagcagatcagcgaaattgccgctgcccccacagccgcccggtatactgtgtgtttatggttacgaagccagctcatgcctctgccttctcatatctgccatacttgctgtaatggccatatttggaatactttccgtatttgccgtaacgtccataatacctgctgtaataaccgtttcgctccatgctcaccttattgaggacaaccccgagaatacggcatccgcttttttccagctgtcccttgacccgctgctccagacggtagcttatggagccgctctccaccaccatcacagccccgtcgcactgacgggccacgattgctccgtctatcagattagccatgggaggcgtgtcaataataacgtaatcgtacaattgccttaatttacaaatcatatctccaaacaggctttcctctaaaagctctgccggatttggcgaatacggtcctgcgaatatgatactgagattttctatattcgtgtcataaaggacatgctccattgaccgctgtccgcttaagtattgggatagtcccgccacctcccgttccagctgataacgggaaaccagtacggattttcgtatatcggcgtcaatcatcactactttcttaccgatttgagctagagacgacgccatggcaaatgttatgtcgctttttccctcgtcaggcagggaactggtcagcatgattgtcttgatgccgcttccgcagaactgtatattggtcctcaatgttttaatggcttcattgtaatggtagtcatccttcatctccctgtttagtgcaacaaattgtctcatgacgcctggcctccccttttcttttttctggatttccctgatgccgtcttattccttgattttgaggatatcatggcctccttatcctctggcttttctccttcacgctccggcaccgatgccaggacagataatccaaggtattttgcaacatcttcctctgtccggatggtgtcattcataaccacattcacggtgatggctccgcagaccagtacggctcccagcagactgcctatcagtgcatttttcacattgcttggacttgacctgagtatgggaatttccccctcctcaatcagtttaggaggaaccatctccatgatatccccgatatagtcggaggatgtggttgcaatcttgtctgcgattaattttgccatggatggatccggatcctccacggaaatagaaagaatccgtgtgtcctggggattgtcaattgtcaccttctctactaagtctttatatgtaaggtccagctccatctcttcgatgacctggttcaggactctcctgcttgtaacgataattttatagtccttggtcagctggcttcctatctgcagatcagccagtgatgtcaatgtggtttcttttgagaggatataaaccattgcagtggacttatactggggagtgagcacaaaggcgctgaatgctcctgccacgcctccaaacaatataataattcccaatatcatccatatcctgcgccggaactcacctagcaattccaagaggtctatctcaatctcgttgtcatcatacgtcttttccatacctcgtcctgttctcctgttttttaattgtatttcgtttctgtattattttcttcgcatttccccgcagcaggctgtggagtctgcgcccatccagatgtttcacaagccagcaaaagctctcctctatgtccggttttctgtagtccatgcggtgcatatcagttcccagacaaaaaattctgctctccgtaacctgcttcctgcaccagcgggtttccttatcccataaatggttcccactgaggctgctgtaattcatctgcagcctgcagtcacattgggctatctctgacaggttggtcccttgcctaaggcacgtataccgttctacatgggctatgaccggtatgtatctggccatggtcagtttcctgattgcctggtacatcttttcataggatacctggggatcaaattccaccagcacatattggctgccctccagggtaagggcctttccctccctgagatggtccaccaagccctcatgataataggtctcctgccccagacccgtcataaaatccggtgcaatgttgtgtgcctcctccttcaaacgttctgccagctcatatataccggaaggcaaaccactcctggaataatggggcgttgccacaatatatcggattccctgcctgtaagattcctccagcatccttctgctctcatcccagtccctggacccatcgtcaattcccgggagaatatgtgcatgcatatcaatgattcccgtcatatcatcaccccgttatattttctatacaggttttttaaataaggaagcatgtcctcggcccagaaatattcaggcatataacttccggaaaacagggatataaactctggatttcccttgataaattcatagaaatcgcagacaaactgctccgtatccaccgcgtagctgcctcgtttctttattaatatttgttctattccatattccatcaggctcatccgaaggcggtaaaatacaacccttaagttgtttttcgccgtgctctctttaatgttttcatataacagatatgtcatctgggataatgaaacgctgcttccgcgtttttcgaccataattgcaagcatctctttcgctttgctgctgggaaaataaaccattttaccgtttacataaacatcaaatccatcaaaggtctttataaatatagttacattccccgtttctgccatcagcgttatttctcccgttattccaagtcgcataccactgttctttgtaaggatataccactcaattgctttcaaaatcgttacaaaaccgtttcactttgtaataaaatggtatttttgtcgatttatggatattctttcatgtagtttgacaatttataatttataaaaccaacattggttccatggacagcgaaccaatgttatggttcaaaaaaaccacataatcaaaattatgtggtccatatcctttccccgttacccatacccttacatttataaagtgatgaagttccttgtgttgaattatcatatcattattaccaaattccgccaatcccaggggggatgcaatccttaaagaaacgattcagccgttctattaggtgagatcaaatgataataaaagcgaaaaaaggcatccctctgcggaatgcctttttactgaactgccggctgcaacgccatcattctatccacttttataaaagtccgtccctacgactccccctcctcaaaataatcccttatcaaattcgacaaagtaacctccgcccagctatactccggcatatactccccgacgaaaaagttagaagccccctgaacctggcggaccatatcgtagctgtcgcagaccacagcctccttattaatggcataggttcctctgcccttcaccacaatcttctcaatcccatatttcttcaatgtctgcttcagtctgtgccacgctaaatggacagcctgtttggctgcggtttcgtcccgttctccttcatttaaaatctcagccaggtgagataatgttacttcctttccgctccagtccacaagtattgcgagaagttctttggctttgctgctggaaaagtatatcagctcaccttgataatacaaatcaaaaccaccaaaggtttttacatataccttatccgatgttatatcaaacatgattcatgctcacctatcatcccgtattcaaagagaatctgcttctctttgtgtgctcctatttgtatcctcctcagccatcaggtcctatttatatgttaacataaatgtcattgtaagaccagttgtatatccatgaaaatacaaataatgcccctccatattttacctaaaatatgtattttttcaactggtttattatatttgtgattttaatctgcctccgcaatgttagtaaccacctgtgttaaaaataagtggttaaaaaagaaaggctccgcttccattccgcggcgcccttctttttcactatggtccttcgtttcttatcctaaaatcctgtatacccaggtgtcagccgcagcttcctcggggctgccgcctttaccgcacctgcatacctcttttattttcccaccaccttgtacgtctcctccacaatacgttccatggcgttgagaatgttttcataccctgtgcatctgcacaggtggccggatatcagcttgcgcagctcatcgcggttataccgctttccggtacctacgatctccaccgctgtcatgatcagtcccggcgtacagaaaccgcactgaactgccgcttcctctataaatgccttctggatggtgctcagctcgccgtttggcccttttaacccttccactgtcatgatgctgcggccctccgcccacatggtcaggtagatgcagctgtctatggcctctccgtccaccagaaccgtgcaggcgccgcactcccctacttcgcagccctttttcacactggtcagtcccaggcggttccgcaaagtctccagaagggattctcttgggtccactgccaactccacttcttttccattaacagtcatatgcactatgttaagcatcccactcacctcctgcgttgattacggcctgctttacggcacgcctgcccagctcctccaccagctgcagcctgaactccctggaagctctccagctggaacgcggatttacttcctccagagcgccttttcccacagcctgggccagagcctcccctgtttccattccctttacagcctcttccgtcgtatggcagcggatcggagtgggcgcagccaccccgtatgccaggcgaaggtcctgtatgtgtttcttatcctctgtcagcttcacgcttacagcacaccccagggtggcgatctccatggcatttctcttgccgtatttgatatattgaccgccgtagccctggtagttctctttctttatccggatagccgtcagcacttcatcgtgattcctcacagtccttcccggcccggtgtaccactggctgatgggcacctccctgacgccgtcaggcccctcaaggaccaggaccgcatccaggcagcacaggctgctggcgctgtccgcgctggtcacgccgttgcacacattgccgcctatggttccgatgttgcgcagctggggacctcctgccatgtccaccgcatctcccagcatgggaatatgcttctgaatgatgtcattattggtaatatgggaaaatgtggtggccggacctatgacaatggttccgtcctcctccattcttatgccctccagctccttaatcccgtgaatgctaaccagggagcagccggccagctttccctccctgattttaatcagcacatcgctgcctccggagatgaccactgcctcagggtcttccactagggcgcgcaccgcatcttccacatctgctgcctgataaaattttccgatatcatacatgctgtttcaccgccctttctatattaatcctgcttccttgaaatgcttcaccatcttctgtggatccatgggcagactgtccactgcaacgcctgtggcgttaagcactgcgttgcgcacagccggggcaaccggaatcgccggcggctccccaagcgccttatttccaaagggacctgtgggatcatccaactccacaaagagtgcgtttaagtccggagtatccatggctgttggcagcttataatccagcaaattgtcgtttaacggtctcccctttgcgtcaaagagcagctcctcgctgagtccgtagcccagtcccatgctcatgccgccgtgtacctgggcagcagccagcttggggttaatcagttttccgctgtcatgtacattgacgatattggtcaccttcaccttgcccaaaggcatatccacctccacctccgcaaagcaggcaccagtggcaaatgtattggtcttgcaatggctggtggcctctgccgtgatatgtacggagcggtccaggctgtaaaatgccgtggtggccagctcctccatgggcagcagctgcgttccggtctccttatccacaatgtggttatccctcacatccagggtatcctggggcttctccagcatataagcagcgtaatccagtatcttttccttaaatatagcgccggttttcttcactgccataccgctgacataggtctgcctggaagcatatgcgccggtatcaaaggggcttacgtccgtatcctgggtggacagcacatttaccttatcttccgtgattccggtcacctctgccgccatctgggtaaacacggtgtcggcgccctggccgatttccgttgcccccatctgcagctgcatggagccgtcctggttcagtatcatgcggcaggatgctgtttccagggatatgggatatacgcctgtcttatagcagaagatagccataccgattccctttcgcacgggtcctgtctggttttcatattccctgcgtttctcatcccagcggatgaattcccggcccttttccatacattccgccaggccgtatgtattgcatttcacatgagtgtgggggtcaacgtatcccggcctcatgcagttctttttcctgaattccaacgggtccatgtgaagggccagggccaggtcgtctgccatgcattccgcggcaaacgcggcctggggaattccgtatcccctcatggcgccgcccgtggccagattggtgtacacagtccaggcatcggactccagcaccttctcatccttgtaaatctgcttgaactcattggaggagttggctacgatggcatgggcatgggacgcgtatccgccctggttggaatatgcctccagcttcctggcaaccagcgtgccgtccttcctggccgctgcctttaccttgaactcgatggcatggcgcaccctggtacatcccagagtttcttccctggatatctccatccttacccctcttcctcccacctgggtggtaaggaaagcatttaagggctcatagagtacatcctgcttgttgccgaatccgccgccgatgtagggctttatcacacggattcggcccatgggcagtcccagcgcctggctgatgacacggcgcacaatatgggggatctgcgtggatgtggtgacgatgattcttcccttttccatataggcaaaggagatgggcgtttctatgtggcagtgctgcacgctctgggtccggtagtccttttctatctccaccagtccctcctccttcactgcttccccgtaagtcccttcgcccaccacaaaagaagaatgggcgataacatttcccggtttttcatcgtgaagtcgggatgcgccctctgccatggcgtcctccacggtcagcaggggagcatactcctcatactccaccttcacaagcctggctgccctggctgccgctatatcgtcctccgctatcacggctgcaatatcgtctccatagacccgcaccctggtattgagaagtttcctgtccgcaatatcctgatgggccgtttccacggaccatggatggccgggtgtggggaactggatgtccggcacatcgaagcacgtaacaatcttcactacccccggcaccttccgtgcttcttccaaatcaaagctttttaccacgccgttggcgatggtgctgcgtattacctttgccaccagaagaccctgtggctctaaatcggctgtatacctggcactgcctgtgactttgtcaaatgcgtcaacgcgggtcatgtttttaccaattcccatggtgtgctctacctccttatcctgaatgcgcaaacgcctgtattccaggcgtctgcattatatgctgctcgttttaaattaatacatacttaagtacaaataatatagccaatatatacatcagaaggctgattttcttctccttcgcatggccggttgcaacgttgataaccacgtaggagataacgcccattgcaataccttcggaaatgctgtacatgaaaggcatggcgatgatggcgatgtagcttggaattgcctctgtaaagtcgttgaaatcaatcttcaaaattgagctgatcatcaggaaacctacgataatcagggccggtgccgttgcaaaggacgggatggctaagaaaatcggtgacaggaacagggacagaccaaagaatatagctgccactacggatgtaagtccggttcttccgccttccgcaacgccggaagcgctctcaacgaatgtggttgtggtggaggtaccgaatacagcgccaagggaggtaccgatggcatcagacagaagggcgcctctaatcttaggaagctttccgtccttatccagcatatcggccttggatgccacgccaatcagtgttcccagtgtatcgaacatatccacaaacaggaacgcgaacatgatggttacaaagttcagggacaggatgccgctgaaatccatcttaaagaaggtgggcgccatgctctggataccgaaaccgctggagaaatcaggaagtacgctgaacattcccagctctgcatttggctggtacagccctgtcacttcgcagataatacctaaaatccatgtgatgagaataccccagaggatgtttccctttatgttcttaacaaccaggataccggtaataagtacgccgataagggccagcagtacagtgattccaacagaattaaatgttcctgcgtccagagagcctttgaatgaaaatacggatacaagggtggcgctctccaccacgattttagcgttctgcaggccgatgaaggcgataaaaagcccgatacctgcggatactgcgtgtttcagattcatgggaatggcattgaaaatagcttcacgcacattggtaagagacagtgcgatgaagataaggccttccacaaatacggctgccagagccatctgccaggtataacccatctggagtactacggtgtatgcaaagtaagcattcagtcccatgccgggcgccagcacaaaaggataattggcaaatgcagccatcagcagggtggcaaccagggatgcaagggcagtggctgtaaagacagcacctctgtccattcccgtggcgctcaggatgttcggattcactgcaaggatgtaggccattgtcatgaacgtggtgataccggcaattacctctgttttgacatctgtgtggttttccgacaggtgaaatactttttccaggaatccctgatttgatttgttctccatacttcatacctccttgaattcatacctatagttttccgctgtttctattttaaagaacggtacccctttccgcccttttatgtatctattcaattttcatttaaaacatcttctgttaaaatatctttctgcccgccacatacttggcgtcaatatggcgctcatccgagaggtaaatgaaccgctccagccgctcctttaagctcagaggctgaggatgcttaaggctctcgtcgttcagcaccagcgcgtctaactcatatccttcctcaaagcttccggcctttccgaagaatccgccgccgccctttgttcccaggtagaatgcctcctctgccgtaaggggcttgcatgtctcatccaccagtctccagcgcagcttcgacacctggatggcgtcagccatggctctgaacacggactctcccgcgcctccggccacatccgtgccaagtcctgtggggataccctgttccagataggtcctgacaggcgcaatgccggaggacaggttggtgttggactggggacaatgggccacgtatacgccgttctccctcattctctgtatttccttttccggcggccacacacagtgggccatgatggttttcacgccgctgccgaacatgccgaaatggtcgtatgcatcgccgtaaaactcagaccacgggcaaagttccttcacccagtcaatctctcccttgttttccgacagatgggactggaccggaagatcatactccatctgaatcttcttgagctcttccatcagtgtgtcggagcaggtgggaatgaaccttggcgtgagaatgggagccgtgttcctgtaccgtccctttatgtcctccagccattgtctggtctccctcagggattccgctgtctcctccaccaggatatccgggctgttccggtccatgttgaccttgcctaccatggtcttaagtccggtctcctccatcaaatccatgagaagctccgtagcctccctgtgcatggttgcaaatatacaagcccttgtggttgcactgtgtttcatgttttccgcaaatatggtatacgccttcccggcatactccatatcgctgtacttggcctcctctggaaacgtccgcgtgttcagccattccaatagttcaaggtccatacccagacctctgaatgaatactgcggggcatggagatgaaggtccgtaagacccggcacaatcagcctgtctccataatccgtcagaggaaagcctgcatacatctgcggaagttctttgtacacgccggctgattcgccgtctgcacataccagatatccctgttccacacaaatcagtgtgcgggaatcctggctgtagcagatattgccctttaatacaaaattttctgccatatgctcctccttttccgtgatacgccggtgaccggcgcacccttgtattcacccgtacagcggcgggcccgggcttctatctgcatttttttgcaaacaaaaaaaccaccgctgttcctaaggctccacatcagcctgtctccggcgccccgggcagtacctgatgtgaaaacttatagtcaactattacggtagttggtagaaacgctcaacctatcttgagcatatataagttttgaatacttatacttctattctattgcgtcatcttctgacatcttgagtctatcacaatagacaactcaatgtcaatatatcttgtgttttttgtgcattttctacattttgtataaaataattggcagatatatgaaattcctcctttttctttgtgcgaaaccaatattcttctaaaaatataacgatatggttaatatagatccgccagctggaggagctgtcccaaacgtgtccggaacgccggacggtttacggctggcatacgccgttttccggtgtgattttgtttattccgattaacagaaacagtataacagcagaagaaacaggtcggttatgaacctatgcaaaaaaccagaaggaactctccatcaagaaaatttcctcctggtttttttacatttttaaagagaaagagctgtttggtcatctgtttaaatgactttcccccacgcatcccatcctctgtcaccgcgccaaatcgtctgccaagcgcttgatcttctcccgctccccaatcacaatcaccgtatcctcgtcctggaacacataatccgggcttacatctgtggtcagccatccgcctctggtgatagcgattatgttgatgccgtaccggttcctcagctgtgcatcccgcacagactggcccgtaagcttcctggtggtctttatttcagatatatccacgttctggtccagctcaaagagattgaatatgcgcttggagataagccttctggccaggcggactgccatgtccctttcaggatataccacctgggctccgattttctccagaatctcgccctgttccgggctgttggccttggccaccacctggggcacacccagattgattacattgagagtggtgagaatgctcacatccaccttgtcaccgatgcagaccaccaccacatcgcagttctgtattcctgtctcccgcagtgtctccttctgcagatcctttaccacatacgcatgttccgtgtagtttctggcctgcctgattttttcctcgcttctgtccagcaccataagctccttatccgcctctgccagggttgccgccagtgcgcttccaaaccttcccagacctatgattccataggacattgcctctgtctgttttcgtgccatatataaaacctcctctatccattcaaaatgtgcttaccgctatttcacttatcttcccctatccgatggaaatgcttccttccgcataggatacggatttagtgggtttgaatacccaaatcgtcacaatggtcagcggccccagtctgccgatatacattaccagcacctccagaagcttgcttagggagctgagtcccggcgtaatgccggtggacagacccacggttccgaaagccgatgtgatttcaaacagaatatcctcaaaaggaatcccaggctccaggatacacatgaaaaaggttcccaggcacaccaccagggccgacagcgccgtcacaatggctgccttgtaaaatgcctcctggggaatccggtaatggaaggcatggggctcctcattgcaggcagcacctttgatggtatgaaacaaagtaaataaggtgctggtcttgatgccgcctcctgtggaccccggtgaagcgccgatgaacatgagcacggaaacgctcagcagtccggcggaagtgaattctcccagaggaaatgtggaaaagcccgctgtcctggccgatacactggtaaagaacgcgcccagccaggtaatatcctctgtcagccaaatcaatactgtgccggatgccaaaagtatcagggttgtcacaatcaccgccttggagtgaaggcacagctttttaaaggagcggttctttatcaaatccatgatgaccaggaagcccagccctccaaatataatcagtccggccgtagtcaggttcaacagcacattgtcctgatatcctgtcaggtttttaagtccccccagtatatcaaaccccgaattgttaaacgcggccacagagtggaacaggctgatgccaaccgcctttaagggcggataatccctggaaaataccaggaagcttaagacagctcccacgccctcaaaacaaagggtggtaatcagtacatttctcaccagacacacgattcccctgccggaatccaggttaagggcttcctttaccagaaggcgttcctttaaattcaccctttttccaagagccagaatcacgcccacgcccactgaggtcacacccagaccgccaatctgaatcaaaagagccaccacggtctggcccagagccgtataggtatcggctgtgtccacagctataagaccggtaacacacactgcgctggtggatgtaaacagagcatccacataatgaagcctgactcccggctttatacacaccggcagcatcagcaaaaaagatcctgtaaggataacggccagaaaaccaatggcaatgattctggccggagactgcctttccagatacttcatataatcacctcctagtgccttcaagcttaccactaagggcataaagcaggtataacggaaccgcctccggtataaagattatataaatattatataaagatacagtcatttaacccaaagatatgatatactgtccgggtagacaatgaaggaggtttttcattccatggcccattcccgaatccttgacaccctaaaaaccatggcagtcctggccgcagccactgccattggattcctgttagaaacccttggcctgtcccaggccaacatcattaccgtatatattctgggagtcctggtggtggcggcagtcacagccagccgctggtacagcatcagcgcttccctggccagcgtactgctgttcaactacatatttacagagcccatgttcgtcctgaaggcagaagacgcaggcacccagcttacccttctgattacatttctggcagctgtatttaccagttccttcaccgtgcagatgaaagaaaaggcacggctttcccaacaggatgcctaccgctccggcgtcatcctggacaccagccagatgctccagaaggccgctgcaccggcggatatcctgacctgtaccgccatacagctgaacaagctgctcaaaagggacattacctgctttgaacaggatggagccggccttaagtcccccctttgtttccgtgagtactcttctcctgcaacaggaaggggaccggcccctgacaccttagaggaactgactgctgcccggaaatgctttcaggagggaaaggaaacaggggctgccacagggctgtttcctgcagcagcttaccacttcctgccccttcaaagctcaggcgctgtctatggcgtcatgggaatccatgtgggcaccacgcctcccggcgactttgaaaacagtctggcagtagccatcatagcccagtgttccatggcgctggaaaaagaatatatttccaggaagcgggaggaggaagcggccatggcccgggcggaacagctccggagcaatctgctgcgttccatctcccatgacctgcgcaccccgctcaccagcatatccggcaatgcaggtgtcctgatgagcgatggggagaacctgtcggccgaacaccgtagccggatatacagggacatatacgatgattccatgtggcttatcaatctggtggaaaaccttctgtccatcacccgtatggaaggccagggcgtccacctgcacatggaaaccgaattgctggaggaagtcatagacgaagccatgcgccatatcaaccggcgtcacgaacaccacaccatcagggtaaatcaggtgggtgactatatcctggctgacatggatgccaggctgattatacaagtcataaccaacctggtggacaatgcggtgaagtacacgccggaaggttccaccatcatggtaaacagccgccaggaaggcgcctctgccgtcattgacgtcagcgacaacgggcccggtattcccgatgagtcaaaggaaaaaatttttgaaatgttctataccaccggccacaaatccgcagacggaaagcggggcatgggactgggactgcccctttgcagggcaatactgagcgcccacaagggcaccatcgaagttttagacaacaaacctgccggaagcatattccggcttacattaccagccaaggaggtatccttacatgaataagccatccatcctgattatagaggatgacaaagcagtgaaaaatctcatcgccaccaccctggagatgcacgattaccattatatatgggcggataagggagaacagggcatcctgtccgctgcttcccagagacctgacatcatcttactggacctggggcttccggacatggacggagtggacgtgattcttaaaatccgttcctggaccaatacccccattattgtcatcagcgccagaagcgaggacagcgacaagatagcggccctggacgccggggcggacgactatttgacaaagcctttttccgtggacgagcttttggccagactccgctccacccagagacggttaagctatatgcagtctctggaggaagtacagacctccctgtttgccaacggcgggctgaccattgactatgcggcgggatgcgcctgcctggacggggaggaactgcacctgactccctatgaatacaagcttctctgcctccttgcccacaatgtgggaaaggtcctgacccactcctacataacccgggaaatatggggtgcagcctgggaaggggacgtggcctccctccgcgttttcatggcctccctgcggaaaaagattgaaaaaaatccctcacagccccagtacatccagacccacgtgggagtgggttaccggatgatgaagcggtaagggattatacaaccaatagatgaaatccgacggtatttatgtcattatttatgtcatgaaacccttcagagcccagtcatatgtatccatggcctgctggaagcctgtgtctgccctttctttggcagcagcggcgtccatgtaggccgcttttgcctccagatattcctggcgcgacagcattcccagggccagcttgttggatgctgcctggaacgcggcttcctgggatgccatggacgttgcagcgctggtccagactgtctggctggccaggacatcctgatacagggtatccagctggccgtacatagcctcctcgctctggcggatatcccgctggcgggcatgaagttccttattggagctggctcccccgctcctctgttccctcagggaataattatttcccagggcgcgccatttgtcgatgctgcctcccatctccaggacacgctccggccggggcgcaggcatgggaccgatttctgtctgggagtcttccggatatccggtgagaatgagtaattccttcttcacccgttccatttcgtcccggacagcctttgccctggcagcagctgcatcggcctcctttcctgcctggtccgcctgggcggcagaagcgcttcctgcctggacctggcgcagcagtttttcatactggctctgtttccactctgcccgggccagagccgcctcctgttctgccttaagggtattataggtgcccatgagattctgggcggtccaaagcacggtatcctccattctgcgaagggacatggatgcctggctgccctgggccgagcgaatctgcttatccatatccttggctgcatcctccagtgtcttggcctgggcccggtactggctggcactgtctttgtccccgttcttctccaggtcctcggcctcctccctgagaagacgtctggtttccatgatttccttcctggcattctcataccgggccaggcggctgtcatactgcgcctgttccatctgtatctgggggctgctggcttttaccagcgtctctaactcctcataacgaatgacatcgggcattgcatctgcatgggcctccagagggtacaggcaggcaaagaagagggccatgcagagcagtaagtatttttttaccatatcctatgccccctctgtctgtgcaaggccgttgaccgcccatctgtaatcctccagggcctgcctgtatttcaggcctgccgtgtcgcatgcggactggctggaggccatggttccctgctgctgtgtatattcatttttggaaatcatgcccaggctgtatttgcgctcggctgtctgggccccggtacgggccagctccagctcgcccgccgcctgttcataatcagccctggcctgctccaaaagcttatatctggcttccacatccgcctcaatctgcctgcggccagtctccaccttttggttcatcacatcccactgggtcccgttgcctgtaaatgtcagacggcgctcattggctgtctgggtaaagttctgctctatggccctttccttatcaaactccaggtcaatctgatccatctccccggcatccggcaccggcacttccctgatatccggctgggcattgtgatcccaacccgtcatgacgcagagctctctgcgcagtccgtccctctccctgtcattggtctccagggctgcctgggctgcctccatcttttcacgggccccaagcagctcagcctgggtagccatgccctggcctgctttcactgccatggcctcatactttgacctggcctggttcacatcctcctccagggcaggacgcgccttggccttctgccagtaggatatcatctttgtctgggcatcctttacaagaacagcctcctgtctgtcgtactccagcttcttcacccgtccgtcctcattctgtgaatcagccagctcctggttctgttcagcctgcaggcgggcgcttatggcccccaccgctgttcccgcgtatcccggctggtcctcattgacggaatccattatcttatcgctggaatcatagagcctgtcagcaatatcctggtaggcatttttcatttcatcgtggtccttgcccctgtagtcgtcgtattccagacggttattgataaccgtggcattgtattcgtggaccaggtcagccagctccccgtattccagcacatcatccctcagcgccgcccatttgtccgcagaataggcaaactccgggctggcccatgcagtcaccggccgcagcatgcccggaaccggggccagcatcagggccaatcccatggctcctgctctcttccatgtaccgctcatccgtctcacttgctttcctcctgtctcgattcttgatttcctccggccgcatcctttgatatcctccagccgcatcattgatttcctccggccgcatccttgatttgctccgtcgggatatcccgtctattcgtaacgcagcgcgtctatcgggtctgccttggctgccttggatgcaggatataatccaaagaagataccgaccactgctgaaaatgacactgcaaccacgatgacccccggttttatgaccaccgcaaatcccagaaggaatcctcccagggatacggttcccactcccagtatgacaccgataatgccgccgcaggctgacaatatggctgactccgtcaaaaactgtattaacacatccctggtccttgctcccagggctttccggatgccgatttccctggtacgctccgtcacggacaccagcatgatattcataatgccgattccgcccaccatcagcgaaatggccgcgataccgcccactgccatggacaggctgcccatcatgctgtccactgaggtcatttcctgcatggccgtatacatgtacatatcctccggctgcctgccgtgcatcttggccgcatatgccttgaactggctgaaaaactggtccaggttcacatcgtcctttgcatacacatggagctggtaaaaatagtcgttgggccaggtcagaagggtgtatggaatgaatgccgaacccttgtcatcgctgttgcccatcatcagggcctggaaggcgttgacctccttgcggtacacacccactaccgtaaagtcgtcggtagagccatataaggtggttctgaaggaccgcccaaccgcattctcagtgccgaacagcatctgggcgctcttggtatccatgaccacattcttccttcttcccaggatgtctccctcgttgagatagcggccgtacaccacgttcaccggctgcacatcctggtaattgtagtcaattccctgatagtcaaatttaatcttagtccgcttatactcggcatcactgctggtataggcactgctgtctatataggcgacctggtccttaaaggcctccttggcccgctccatctcgtccagggtaaaataatcgctctgccgcacatcatctacccagtaaccaatggatatataggcctgggtaatacccacatccttgtataaatcagagaaaagtccgcgcatggtatctccgatggacacgatggctatgacggaaccaatgccgatgatgattcccagcatagtcagggcggaacgcatcttattggaccggatggctgaaaatgccatcttcatgttttcaatcagcattctgctctccccccttcccgtcctcagaagtcaccctggccgcattcaatttgtcactctgtatctgcccgtcgctgaaccgtatcacgcggtgggcaaaggctgctatatcctcctcatgggtaaccagcaccacggtagccccttcctggtgaagctttgtaaacagctccatgatttccaccgaggaggcggtatccaggtttcctgtgggctcgtctgccagaattaagggcggttcattggcaagggctctggctatggcaaccctctgcctctgacctccggagagctcgtttggcatatgttccttcctggctcccagccccacccgttccaatagcagctgggccctgaccgcccgtttggcctttggcaccctggcataggtcatgggcagctctacattcttaagggccgatgtcctggatatcaggttaaaggactggaacacaaacccgattttccggttcctgatatcggagagctggtccggcgtcatgtctgccacgtcaatgccgtccaggtagtaatgtcccagggtgggccggtccagacacccgagtatgttcatcagggtggattttccggatccggagtgtcccatgatggccacaaactccccccgttcaatggtaaggtttatcttctttagtcccagtaccttaatggccccggtatcatatatcttgaccagattctccagcttaatcaggggtccgtcatagacctcttcctgaatcatgctgttcctgtgtaaaaacttcatccacttcttcatacggcgcctcctgctactgggtaatcagcacggcagcaccgtccatgagatggggtcccggattggtgataacctgcattccctcctccagcactgtaccgtctgtgggaatgacctctaccaccacgtcgccgtccactcccatggtcacaggtattcgtttaaccttcatatcctgcacaatggctatgtatgtcacttccccgtcgtcaaaaagcgccgatgagggaacgacgaaaacatcctttgcctccctgattaaaagttctgcttttgccgtgattcccgcaataagctttgagcttccaccgtccacccgtatggtagtgggaataaccctctccgtggatccgccgcctttttcctcgcctgtgggcgatatctttacgacctcgccttctgcagtctcaccgtccaggatatccgctgtgatggtcgccatctgtcccacctttaccttgccgatggaaaactcgcttaccttgatttccagctccagctgctccagattctcgatgctgagaataggtttatcatcctccaccttatccgcaaactggcccaccttggaattgacacggaccacagtgccgtcaatggtgctctttatctgggtattatccagttcttcttttttcttttccaaatcaaaggctgcgttctgtatctgtatgccgtaggacgaatctgcaacgcctctcccattctcaaccgtatagccttccatctgccttctggcgtcattcagggcattggcgctggcttccagctccatctgtgaaatgtcgccggtggcaaagagctggctattcctgctgtgatccaggctggccttctggaaatcctggaccgccttttcgtatccaagggctgcttccttatctttttcctgcttattagccaccgcaaggtcgtaggcgttctgggcaatctgcacttcccgctccagatccgtgctgtccaccacggccagcacctgtccttttgtcacggtatcaccctccttcacattcatagcagtgatttccgcatgaatattggacaccacatccacgctgtctgtgcctgatacaggaccgcttaccgtaagcttttcctgaacgtcctgtttggcaaggggcatcacggcaaccgggatccccagctccttctttcctccggacatacgggagaacccaaacaaaaccactgccgccagtaccaggaccgtgattatcttgcgcttccggctgaaccccttaaagcgccggacagggtgaaagcctccctccgatgaccggtgtccggtcttttgcttttgctttttcttctttttctttccgtttccttcctcctccggagccatcagctcctccacgcggcggtcaatttcctcagactctgaaatgccttccaaaacctggatttcctctaaatcaccagcttttttctctgttcccatgactccctccttaataccagcggatactgtattatttatattaatacagttatatcacatatggcatacttatacaacaaaaaataaacatttgcgccattgctgttcatttaataaggctattatataggtttgccataaatatttcatcctgtattttcataacatttcataaatgaaaacgaaagatttacttaaggaaaggggcaaccatacaaaaaaacggcaggtccctgtaacacaggtatttcctgccgcctttggcgggcagggcatcttcctttgccctacccgcctattcttactttgaaaccgattctttctctaaatcaattccttggtccgttaccgttactctgctgcttattccctgcgctgttaccgattccctactctgctgccgctgccctaagacgtttcatcatctcatccacatccgccttctcaatcaccagaggcggaacgaaacggatgatattggtcccggcgctgattaacaccagcttctgctccagcagcgcttttgacacaatggggcctgccggtacagagaactccaatccctgaatcaatcccattccccggtgtgccctgatgcaatccagttcctttgacagctcctccagcttctcatagagataggcgccaatctcctttacatgttccgtgatacggcgtttctcaaaaatatcaagcactgcgctggctcccgccgtcaccagcggattgccgccataggtggtgccgtggtcgcccggaaccattgcgctggccgctttgccccatgccaggaaagcgcctacgggaaacccgtttcccagagccttggccactgtcatcacgtccggcttcacgccgtaatgctgccaggcaaacatttccccggaacggcccatgccgcactggatttcatccagtataaggagcaggtcatgttcatcgcacagggccctgaccccttttatgaattcttccgttgcaggatagatacctccctctccctggatggtctccataatgaccgcacatgtcttactgttaatcagcttcttcacgctgtccaggtcattgaaatcagcgaagcggattcccggtataaggggcttaaagggctcctggtagtgggcattgccggtgacggccagtgcgcccaggctccttccatggaaggaatggttcatggcaatgatttccccggtcatgtccggctccgcgtcctcgcagccgtcgcagccgtctcccatggtttcatgaagtttgttatagtgatagcgctttgcaatcttaagagctccctcaatggcctcggtaccgctgtttgtgaaaaacaccttatccatatgggatacctgaagcagcttctcgccggcctcaatggagggctggttgtagaacagattggagatatgggtcagcttgtgaagctgttcctccacggcctttgtatactcctcatccccatatcccagcgccatgaccgcaatgccagcaccgaaatccagatactcgtttccctctgtatcgtagagcttcactccctccccatggtcaaacaccacagggaaccggttgtacaccttataaagggcctgttctgcccgttccatcaactgtttatcagccatgataatacctctcgtcttcttcggaattatagatagcggttccaatacccttgtcagtaaagatttccagcagcaggcaatgaggaatacgcccgtccaggatatgcaccctggatacgccgttttttatggcgttaatgcagttttgaagcttgggaagcataccgcctcccagcattccgctgtccacaaaattctgggcctcctccaccgtcatctcggagataagggaggacttatcctcataatccttatacacgccctccacatccgtgagaaaagcaagcttttccgcctccactgccgttgcaatggcacaggccgcgtcatccgcattgatgttatagctcaggaaatcctcatcaaagcctatgggacagatgatgggcagaaaatccttttccagcaaatcatatatgattttgggattcacttcctccacatctcccacaaacccgatgtcctctccgccggcgtatttcttacggcatttaagcatcatgccgtccttgccgctgattcccaccgcattgatacccagctcactgaccagctggaccaggctcttattgactttattaaggaccatctcggcaatctccatggtgggttcgtctgtaaccctgagtccgttcttaaactgggcctccattcccaccttgcctacccagcggctgatctccttcccgcctccgtgcacaatgatgggcttaaagcctaccagcttaagaagcaccacatcctgtataacctttttcttcagttcctcatccaccatggcgcttccgccgtattttaccaccacgattttcctgttaaaacgctggatataaggcagtgcctcaatgagcacggccgccttctgcattggttccaaattcattttcatactcctctcgttatgagcacttagcgcctgtccttcaggcgcttacgtgcgatacatctcactggcacttggcgaggtctttttcgagcttagtgcagcggctcgttatgagcggtaatccgcattaatcttaacatagtcaaaggtcaggtcgcagccccacgcagcggcctttgcatcccccatcttgatgtcggccacagccgtcacctccggctctgacagtatccgggtcgcctgctcctcgctgtagtccacggccacgccgtccttaataatctgcatctttcctgccgcgctctcaaaaaacaggtccaccttttccggatcaaactgtgccccggaataacccatggcgcagagtatcctgccccagttggcgtcatggccgaagatggctgccttggtaaggctggagcagattactgattttgccagaattttggcctgttccttagtctctgcccccactacctttacctcaaacagagcggtgcagccctcgccgtcgcctgccattttcttggctaatgtttcgtttacaatctttaaggctctgcagaaggtatggtaatcctcattcttctctgtaatttctttgttgccggccagaccgtttgccagaagtagaaccgtgtcattggtggatgtgtccccatccacggaaatcatgttgtatgtatcctgtatatcctggctgagtgcctcctggagcagctctttgctgatggccgcatccgtagtcacaaagcttagcatggtgcacatattgggatgaatcataccggagcccttgcacatgcctcccatggtcaccgtggttcctcccagctcaaaccggacagccacctccttgttctttgtatccgtagtcataatggccctggatgcgcctgtgccgctctcaaggcttccgtccagcaaaggagccatggccttgacccctgccgtaatcctgtccatgggcagctgcatgccgatgacgcctgtggatgccaccaggacgctttcagcagaaattcccagggccagggccgctgcctctgctgtctgtccgcagtaccccatgccttcctctccggtgcaggcattggcaatgcctgcgtttataaccactgcccgggcaggcgccccgcttgtcacctggttcttatcccattttacaggagctgccttcacaatattggtggtgaaggttcctgccgacctgcagggctcctggctgtaaatcatagccatgtcctgacggtccttatatttgattccggctgctgttgaagcagccttaaagcccctggcagccgtgacgccgccggttatgattttgattcccatgcctgtctcatccatatcactcattcctccatttatttccatacctttatgtcatatgaagatgcacctgcctttatcacggtgcactatcctttcattttaccgtacaaaccgggtgatgttttcctcattcagtatgaattcgtatgtattcacatcctcccgttcctgccacccgattccctgccagaacgcatttcccacctcattacccttaaacgcaatcaggctgattttgctgactccttccttctgaagggcctccatggcaaagcgcaccatgcggtatccaatgccgtgtttcctgtatcccggcgccacgcacacatgataaaaacaaccggtcctgccgtcatggccgcagaggatatttcctataatatgaccgttctggacagccaccacactggtagtgggattcctcccaagaaagcgctccactccctcccgtgaatcgtcaatacttctgattccaaagcccttgatttctgtccacaggccgtagacctggtcgtaatccgctattgtcatttcgcggataaggatatccattgtacctgccatgatctcatatttcctttctctttccctctttcatccttttcagagatgtcatcaaaccaacagcctgaaccatcaggggaaaatgggaatctgcttaagccccgtattctccggcaggccgaacatcaggttcatgttctgtatggcctggcctgccgctcctttgaccatgttgtcaatggctcccatcataaccacccggttggtcctggtgtctatcttgaaattcacgtctgcaaaattgctgccctccacccaccgggtctggggcaccacatccttttccaggacacgcacaaaatattcatccccgtaatatttatcgtacacagcctttacctcctcgcaggatacttcctttgtaagggatgcataggctgtcaccaggattccgcggttcatgggtaccaggtggggagtgaagctgatggttaccggctttcctgctgcataggacagctgctcctctatctccggcgtatgtctgtgggaggccaccccgtaagccttaatgttctcattgacctcacagtacagactgtccaccttgcttcccctgcctgcgccggatgtgcctgacttggcatcaatgataagggtattggggtcaatgagcccttcctttaccagaggataggtggacaggaaggagcaggtggggaaacatccaggattggcaatgagcctggccttcttcaccttttcccggttgatttcaggcaacccgtatacggcctcaccgataaactgcggggatgcatgggtcagcttataccatttctcataaaccgacacatccttaatacggaagtcggcgcttaaatcaatgacctttactttagataatacgtcctcgtccatcagggatgcgcacagtccctgaggggtggcggtgaacaccacatccacctgctctgccagctccttcatattatcatccatacacgcgtcgtccacgattcggaacatgttctggtagatggatgcatatttctggtctatgtagcttctggaaccataccatttaatctctatgtcatccctctggagcaggagccttgccagctctcctcccgcatatcctgtggaaccgataatacctgccttaatcatatccgtatctccttatatttataaatattggctgctgccttcattatagtcagtttttctttaaatgaaaagaagcatttctgtgaaccctgtttcctggttcccgtttagatttcataattatacattacaaatgcataatatgcaatatcttttaaatatttttatttagcacttgcattttatcacataatgttgtatatttatgaaagttcaatcagtacagcaatctcaggaggatatcaatatgaaagaaaaagtagttttagcttattccggcggactggataccaccgcaatcattccgtggttaaaggagcattttggttatgaagtcatctgctgctgcattgactgcggtcagggcagcgaattagacggactggacgagagagccaaattatccggtgcctccaaattatatatcgaagatttagtggatgatttctgcgacaattatatcatgccctgcgtaaaggccaatgcagtatatgaaaacaaatacctcttaggcacctccatggcccgtcctgccattgccaagagactggttgatattgcacgtaaagaaggcgcctcagccatctgccacggcgctaccggcaagggcaatgaccagattcgttttgagctgggtatcaaggccctggccccggatatcaaaattatcgctccctggcgcatgaccgatgtatggaccatgcagtcccgcgaggacgagattgaatactgcaagcagcacggcattgacctgcccttctccgcagacagcagctacagccgcgacaggaacttatggcatatcagccatgagggcctggagttggaagatccgtcacaggaacccaactacgagcatctgcttgtacttggcgtgactcccgaaaaagcaccggatgagggcgagtatgtgaccatgacctttgaaaaaggtgttcctaccagcgtaaacggacagaagatgaaggtttccgatattatccgcaaattaaatgagctgggcggaaaacacggcatcggcattgtggacatcgtggaaaaccgtgtggttggcatgaagtcccgcggcgtgtatgagacaccaggcggaaccattctcatggaggcccatcagcagttagaggagctggtattagaccgtgccaccatggagacgaaaaagaccatggctgataagctggcccagattgtttatgagggcaagtggtttacacctctgcgcgaggctgtccaggcatttgttgagtccacccaggaatatgtgacaggcgaagtaaaattcaaactgtacaagggcaatatcatcaaggccggaaccacatccccttactccttatacagtgagtccctggcttccttcaccacaggcgacctgtacgaccaccatgacgcagacggcttcattaccctgttcggactgccccttaaggtaagggctatgaaaatggctgaggtggaatctgccaaaaaggaccagtaaagagacaggatgcactgttacacataaagaaaatgccccggagatattacattttccatctccggggcatttctttatgatgctgagcagattggccagcatttcactctcttgggaaaggactcaatctgtttccatggaaaggcagcgccgtgtctgctgttctccccctgcattcgctccgctcaggagcaaggttatggataacggaatccggcccggcattgactttcccgaatttccttagagcctttttaacttgaaaaaccggtaatatattaaataatatactaatatataaccttaaatctgcataaattctcttcttttttcccaaaatgtgtcgaatatataagatagtatgtatattatatccatcagcacaaaagaggggtaaaagtaagatgaaaagtatcaaaggaaaaattttattatgcatgtcactgactgttgtcatctgcctgagcattttagggggcgcaggcatctgtctgaattacagcagtaccaatcagctgttggagcagacgctcagggaaaccgtcaaaatcgcgtccgacaaggttgcaaatgaacttacatcctatcttaacgtggctatcgacacaggaaccattgcgcggctgacggatccccagcagagccctgggaataagcagcttctgattgatgacaaggtaaaacagtacggtttccagagagggaacatcatagggccggatggaatcagcgcccttgacggcaaggactattctgaccgggattatttccataaagccatggccggccaggccaatatatccgatcctttggtcagcaaagtcaacggagaactgtccattattgtggctgctcccttatggaaggacggacggcctaatacaacaatcgcaggcgtggtattctttgttccgcggagtacatttttaaatgatattgtttcgcaagtgcacatcagcgataacagcgcagcttatgccatcaattcagatggttataccattgcggacaacaccaccagcacaatcatgacacaaaacatagaagaggaagcaaaatccgattcatcactggccaggctggccgccatacatggaaaaataaggaagggagaaagcggctttgacaagtatgaaattaacggtgtgcagaagctggccgcctactctccaatcgccggcacagacggatggggcatggccatcacggcacccacatcggattttatgggagcgacccttacttccattggaatcacatgcgctctgttagcaatatcactgattgctgcagtggcaatcgcttattggctggccaggaaaatcggcaatcccatccacatctgcacggaaaggatccagaaactgtcggaaggtgacttaaagtcgcaggtgcccgtcatacattccaaagacgaaacgggcagactatccgaggccacccgtctcattactgattccataagcaatattatcaatgatattgactggggactgagccagatggccgcaggtaactttgccatcaccagccagtcccaggatttatatgtgggggattttaaatcactctccgactccatgtacaaaatattaaaggagatatcagcagttttaagaaacattgaccagagtgccgaacaggtggccggcggctctgaacaggtggcggcaggagcccaggcactctcccagggggcgaccgagcaggcatcctccatagaggaattagctgctactgtaaacgatatttccaatcatatagataaaaatgccggcaacgcgaaaacagccagcgaaaaagccgcctccgtaatggaccaggcaaaagaaagcagccagcgcatgaaggaaatgctgacagccatggatgacatcaatcaagggtccggtgaaatcagtaagatcataaagacaattgaggatatcgcgttccagacaaatatcctggcgctgaacgccgcggtagaagccgcccgggcaggagaggcaggcaaagggtttgcggtggtggcggacgaggtacgcaatctggcaggaaaatccgccgatgcttctaaaaatacatcatcactgattgagggatcccttcatgcggtggaacgcggcaccaaaatcgccagtgagacagccctggcgctggacgaagtggtaaatggcgttgaggatgtatccgcggccatcaatgagatttccgcggccagtgcagaccaggcgtcctccgccagacaggtcacacagggcatagaccagatttccagcgtcgtccagacaaattcagctacagcacaggaaagcgcggctgccagcgaagagttgtccgggcaggcccagattctcaaaaatctggttgggcagtttaagtttggcagcacggaagccggtgaggtgcccatgatgccggtccctgatgaaaccaaatacgtggttcagggatgtgacgaaactaaatattaatcttgaggaaaggaccgcttattaaatgaaaagccgatgatttcatccgtatctgtgaaatcatcggcttttattccggctctttgctgccggctgctcctgccgccaggaattccctttcaccgccgtcaatccaggcggatcttgtttttctccacatccagcccctccggcatattgacaatccggatccttccgtcaatggtgaccggctcaagcactccgttttcactatggctctcaatataggcaatcaccgcgtcaatgatgttgggctgatttctggcccagtccgttatctgctgatactgctcgtcataggtatccgtactcaggtcaaataacctgcaggcgctctcatttccagggtcaaagctctggtagagggcaatcccctcaggcagctgtgccggcttgtccggagggagcaccgtaaacgcgtcccagccgtcgcttccccccagctcatagtccgtggtcgccaccgtataccaggcgtcagggtctactggttctccgtttgacaggcggacatcgctgatttccgcctttcccccatacgcattatcctccagcggttcgtaggtaatggtataggtgaagccggagggaatcaccatgccgccgaacacactggactggtccgctctcaccgcatcggtcaggttattggtggagagtatggatatcaggttggcgcccttgcagcgcacagtgaccacatggttattcaggccgtagagcatggaggtggccaaatcagactctgttatctccccttcctcaagctctgctgtcagagttcctgcattgatggcggccagatctgcgcccgtgtactggcgcagggcatcagccagcaggtttcccagggccgattcattggagcgggaaaatatacgcacataattgtatgtcttatctgtcttcccgaccacatggtccgggacctggtaacggtttttccctgttgtgcggtattcttccagcgcctccagcatcccctctgtgccgccaatcttcatgtaggagctggcgccttccagacctgcataatagttctgtccgcacaggtaatggcgcagggcaaaggtaaacaaatccgaaccgtaaaactggtaaggatttttcacaatggagtgttctgtaaggcactggtaaaattcaggatgggtattctgaaaataatcataatttaatgtgtcatcccgccggtagtaggtggtagcgcccacgggaaccgaagcactgtaatattccggcgcaaactctgtggaggccacatattccagatacaggcggcaggccctgaggacagtctcgtctgttatgtttgcattgattcccagataccagtccccgttggtggccagccagcgatcctccctggttcttcccatatatggtatgaatacaaagtcctcggccttcacccatacctgtttaccgtccttttctattttaaagcttgggaccccgttcacatccctgagcttctcttcaaaatgaaccgcatagtccacatagctcaccgaacacatgactgcgttcccccgaaccacctcccgcagattctgtttgctgctcatcagaaagtctccgttctcatacagccccatgctttccagctcatcaattcccttaaggacacgggcaaatgccggattttcaaaggagacccctgccggattattccggtacagattcagccactgcacatattcgctgtccgtgtacgcatccagaagaaagggcatggccaccactgctgctgcgtcattgtaaagcatcccaaaggcataggcccgtaccccggtctcctcccttctctcctgaatccggcggcagagccccataaactcttcctgtgtccggggcatatcatatcccatatccgccaggagctgtctgttcaccatcagccctgagatatacccgtttccaaccgggagggcatataccttcccccctacctccgcatcatttaaggcgctgatcatgtagttcttcaaaaatggttcggaggtcaaatccttcagataaccgctctggacataggtataataatcctgtgtatagaggatttccgggccgcctccgctgcgcaccgccgccagctgggcattctccatctttggcgctatttcatatgtgctctcaattttaactccgggcatcgtgcggtggatataggcttccgcctgctccgtattgatattctcacccatggtattgtacacatgcagcacaaccggctcctcagccggcggcgcaccgctctgtttcttatcctctgtggccccggtatcccaaacagccgtgcatccggtagcagcggatatcagcaccagcaccagaagcagccctattcccatccgtttcttcatatttattctccctcttccccgggtatggttttcgttaatcacgtttcgctgccgtaccgggtatcctcctgtccagccctacagctccagccccacagctccagtcccacagctccggccgtaccggctgcccaagccgttcagggacagcccttttagcccagcaggccccgcagctgttccatattgatgggctttgtcagtacagcgccgaatcctgcccgcgccgcctctgaccgcacttcatcctcactgctggatgtaaacgcaaagacaggaatggatccggcactctttctttggctgctgcggatagctgccgctgcctcaaagccgtccatgaccggcatgcgcaaatccagcaggatggcgtcatatgtgccgtccggagcattgagatatgcctccagtgcctggcgtccattttccaccgcatccacctgctggccgtcggcccgtatcagctctgctgctatctcccggttaagttcattgtcctccgccaacaaaagccgcagacagcggccctcacgccgcacccggccaatctcctttgccaggaccgcgaagtctatgggctttggaacaaaaccattcatccctgcctcaagggcttctctgcgatcctcctcaaaggcattggctgtcagggctataatagggatggacgctgcccggggatggatgctctcccgtatcctgcgggccgcatccagtcctcccagaaccggcatctgtaaatccatgagaatcacgtcatatgtatcctcaggtgcatccagaaaacgggtgcatccctcttctccgttccgggcagtatccaccgccgctcccatgagtccggagagcatttccactgcgatttccaggttgaccgcattgtcctccaccaccagcaaacgcacgccttttaactcccctgccagtccgccggatatgctctcaccctgtcccagcattccggtaattttccggtacaggctcatccggaacagaggcaggctgattgtatatttaaatcccttctgcttaatctcctcaaacagctcctgctcatccggtttcagtcccagaagccaaagcgtatccccgcctaaatcccgcttcagctgttctccggttaaggtccggtcaaagcggagcattttatagggaagaaatgccatggagaaaggacggcctgccgccctcttttgggccgccagggaaacagctgcctgatagtctgtctcccaggcagcatccacaccgatttcctccagcttttccactgcatccctgcacttttcctcacttcccggctcgccgatgaccagcatggcgcagcctgcggccagaggcacatggcggctgcttaaacggatggaaagcccaatggtaaaggtggtgccctttcccggctcgctctccacccggatggtgccgcccatcagatccacaatgcgcttggtaatggccatgcccaggccggttccctggattccctgtttataagaattctggtcccgtgaaaacatctcgaaaatccggcccatatattcccggctcatgcccacgccggtatcgctgacccggaatacaaagctggcaaatgaaggatcctgtgatggtacctccgtgatatccagatagatttccccgtcctttggcgtaaacttcaccgcatttcccagcacattggtaagcacctgccccaggcgcaccgtatcgccgcacagcaattcatgggcaatgttccagacattgacgtcaaaatgctggctgcgcacgcctgtctgggactgggtcaccgtaaccacgccggacagccattcacccagttcaaactctgtctctgccagctgcattttgccggattctattttggacatgtccagcacatcgttaatcagtcccagcagtaattgggaggaattagcgattttctgaaggcattcggtcacctttttgctgtcctccggtgaatagagggccagattggtcaggccgattaccgcattcaggggagtacggatatcatggctcatactggccaggaaagtactcttggcagcattggcccgtgcctcgctctccagcgcctcttccaggcgcctgcgggactgctcccgttccgtgatatcctccagagtcacagtgataaagcgctggctgctgtcctgttccgaaatcagataggcgttaagggacagcacgatatccctttgggtgtcaggccgggtaaaatgcagcttcaggcttccgctggcacaatctcctttgcggacccggcttatcaggtccaggaccgcctggcggtcgctgccgctgatacagcttaagaacttatcttctatagcatttccaaatgcatcctcaatccccaggacctgttccgtgttgcgggacgcatactcaatagcgccgctttcactgtcagcaatgacaatcacattgggcacataatgggtcatcagggtgaaaatacggtcgcggcgcacagcttccctggatgcgttggcgcgcaccacgaataccagcataattacaatcaccagaaacatgcccagcatcagcacaatgataaacatggtcagctggatggtctcctggttaatctgcgccgcgtccgccgtaatgtggtcataggagacacaggaaatgaaatcccagccggtccgcgggatgggcgcatacacaagctcatagcgggaatccccaaagtaaatctcggcgctgccgcctttatcgtccctgaaatcagagagcaccctctcatattccgtgccgccctgggcgtccggcttaaagaattccgcattcaggggattttcctcaaaatatgtaaacagattcagggtctctcccagttcccggttcacatgggtgcgggagagaatcagacctgagtcagtggtgatcatataggaagcattgtccccgaacgcagtggaatcataaagggcccggaaggattcctggctgtaaattccaatcagtatgacagagcccgcacggcaggagaatgccaccacatcctgccccgaagcgctgaacgggtctgaaataaagctgatcgcctccccgtccgggctgttcaggcagtccacataggcctgactggaatacaggttgatgggtttcacactatccccctggctgtagacaccgcggcctgattcattcagaagtacgcagtaatcgaacacagacactttgttaaaatccctgagataactgcggtccccgttgctgaggccgtcaatggagtcaaaaccattttccttcagttcttcggacatgccgattcccagcacgcgtatctcatgccggcaatggtcaaaaccttcggttgtcttggaaatcagggtgctggttgtctctttcagcgcagagatattggaattgatgatgcggtcgtagatgtccctgcggtatccttccaggaaataagataatgataagtaaaagacaatcgcaagggcgatacagactgtgatggttatcggcagagaaaacttatgtttttttcgtatctgtttcatctgccgtacctcgcttttctggaaaccatataactttaaacagctttgaataatattatattatttgggaagctatttgtcaattttacaaatacgcacagtgccgcctgaatatatctttatcctgctttaaatgaaaccggacccatgaagaagcagcttgttcttcatgggtccggttttaactgccattgagcagcagctgtttatgtctacagtgacttcacggctgccacaacgttctcaaccgtaaatccgaatttcttaaagagctgtcccgccggtgcgctggcgccaaagcccttcatggtgacggtggttccgtcaaggcccacatacctgccccatccgaaatcgcccagtgcctctaccgccactctcttgcgaactgcctttggaaggaccttctccttgtaatcctcaggctgctcctcgaacacgtccatgctcggcatgctgacaacacgcacatccacgccctcttttgccagttctgcctttgcacccactgccagctccacctcggaaccagtggcaatgatgatggcatccggaacttcctttgcagaatcttccagtatataggctccctttaatgcctccttgctggatccggccagctgcggcaggttctgtcttgtgagtaccagagccgtaggagtctttttggaagatacggcgctgtaccatgcagcagctgtctccgtggcatccgccggacggtatacatggaagttaggcatggcgcgcagcatagccagctgctcgatgggctcatgggttggtccgtcctcgcccacgccgatgctgtcatgggtaaatacaaaggtaaggggcacacccataagagcagacagccttgccattggctttgtataatcgctgaacacaaagaaggtggacacaaatgcccgcaggccgccgtgaagcataagaccgtttccgatagcggacatggccagctcgcggacgccgaaatgcaggttgcgtccggcatagttatccttggagaagtcccccatatcagccatataggtcttagtggacggagccaggtctgctgctcctccaatcaggttcggcatcaggttcttaagtttctgaagctgcttgccggacaggcttctggtagcatccggcttgtcctcaaatgcccagtagtcttcactgtcataaacatcattagccagattgggatgatagaatttatcccataattccttcatctccggatatttcccgcagtattccgcaaataatgcgttccatttttcctctgtctcagcgcctctctcagcgtatgccttataattggcatatacttcatccggtacatagaaaggctccatagacggccagttcaggaattccttcatggcttttacattgtcatctcccagaggctcgccgtgagcgctggccttgccctgcttagcgggacagccgtagccaatctgggtctttacggtgatgaaggacggacgtgcggtatctgcctttgcctcctcgatggccttgccgatggcatccagatcatttccgtcctcaacggtaatcagctggaatccaaaggcttccatgcgcttctgcacgttctctgtaaatgcaatatccgtgcttccctcgatggaaatacggttggaatcataaaatacaataagcttgcccaatcccagggtacctgccagtgagaacgcctcggaggaaatgccctccatcatgcagccgtcgccgcccagcacataggtataatggtcaacaaccggatatccgtccttgttgaatacagctgccagatgggactcggccatagccatgccgactgccatgcccatgcctgcgcccagagggcctgtggtggcctcaacgcctactgtatggccatactccggatgtcccggtgtcagagaatccatctggcggaaattcatcatatcttcttttgtaaggccgtagccgaaaagatgaagcagggaatacagcagtgtggagccatggcctcctgaaaggataaaacggtccctgttctcccatcccggattcttaggattatggttcatatgttttgcccacagctcaaaggacatggctgcggctcccaaaggaagacctgggtggcctgatttggctttctgtacagcatctgctgccagaacgcggattgcattgactgacatggtatcaatctgattcatagttccctccattccggtgcccccaagggggcccacgcatcatagatgttatttttttaccaactgccctttattataccaattccatccatgcagggcaatactttttctcgcaaaaatcagtgcaacattttgcggttctttgcgttattttgcaaatttaaaaacaattgttataaaaagattataatttaaacacattttcatcacattttaattttaaaactgtttggtgaatatgtttataaaaaactgacaggaggacacaatcagtgattgaagtaaaaaatcttgtaaaagattacggcggccatctggcagtggaccatttaagcttccgggtggaagacggccagatatacggcttcctgggccctaacggagccgggaagtccactaccatgaacatcatgaccggttatctgggcgccacagagggccaggtcatcatagacggccacgacatactggaagagcctgaagccgcaaaaaaacgcatcgggtatctgccggaaattccgcctctgtatatggatatgaccgtggatgaatacctggaatttgcggcctgccttaaaaagctgccgaaagcagagcagaaagacgctatacaggaagtgatggaactggttaagattacggacgtcagaaaacggctgatccgaaatctgtccaagggttaccgccagagggtgggtatggcccaggccattttagggaagccctctgttatcatcctggatgaacccactgtgggactggacccgaagcaaatcatcgagatacgggatatgataaaggggttgggcaaacagcataccgtcatcctgagctcccacatcctgtctgaagtaagcgctgtctgcgaccatatcatgattattgcccacggaaagctgattgccagcgatactcctgaaaacctggaacaacggttaaaaggcgccgcgggcctggagctgacggtaaaaggcagcgaggaaacggtaaagcctgtgctggaggaaattcacggtctgtccatagagcgtatagggaccggaggcgaggcaggcacctgtgtagtgaatctgcagtttggcggggatgaagatagcagtgtttcggggagcggcattggttccggcggcggcattgctcccgacggcggcattgcttccgaagctgatacagatatccgcgaaaccattttttacgccctggccaaccaccgacttcccatcctgtccatggctccgtccaaggcatcccttgaagaaatattcctggagctgacagaggactccccaaaattgcgggaggacagaggcgccacagaccccacagacccatcaaaggaggaggattcccaatgagagctatctataagcgggagctgaaatcctatttctgctccatgacaggctatgttttcattgctttcatgaccatgttcatgggcatttatttcatggtttacaatatgattaacggttacccctatttttcctatacacttaattccatcctgatgatacttatgattgcggtgccgattctgaccatgcgcagcatgtcggatgaacacagggcgcggacagaccagctgcttctcacctcccctgtatccgtatggggcattgttatgggaaaatttctttccatggtcactattttggccgtccccatggccattgcctgcctctgtccccttatcatccgaagcgccggcaccgcttatctgaccgaggactatgcatctatactggctttcttccttttgggatgtgtgtatattgccattgggcttttcatctcctcccttacggaaagccagctcatagccgctgcagggaccttcggcatactgctgctcagcatcctctggccagggcttttaaactttataccggctgccgcagcaggttccctggccggtttccttatcctgtggaccctggtgtgttttatcatataccggctgaccggccatatccccctttccctcggactggaagcagccggagcggcagtccttataggaacctttttcgtaaagcagagcatgtttgaacgggctctgaccggacttctgggaaaaatcgtgctgacagacgtatttgacggcattgtcagcagccatatgctggatgtcagcggtcttgtctattatttgagtgtggccggtgtattgctgtttctgacggtccagtcaatcgagaaaagaagatggagttgaatcatatgaccagaaaatgtaaaaaaggcagctatatggcactgttcacccttgtggtcattgccgctgtcattgtactcaacctgatagtgggaaagcttcctgccaaatacctgaaacatgacttaagttccaaccaaatccttactctgggggatacaaccagggacatcctggcacagctggacagagacgttaccatccatattgtggccgttcccaactcagtggatgagaggattacatcctttgtgaatctgtataaggacctttccccgcacatttcggtggaagccaatgaccctgtgcttcacccggatgtacttacttccctggacacagagcccggcaatctgattgtatcctgcgagtccaccggaaaaaagacatccatttcatttgacgatatcatccagtttgaccccatggtttactaccagtacgggcaaatcaaggaaacagcctttgacggtgaaggacagattaccagcgccatccgctatgtcacaagcgatacagcggcggccgtatataccctgaccggacacggggaaaccgccctctcgtcagccgtctcagatgccatggataaatccggcatgaaggcagccgatctgaatctgctcacccagggagccgttccccaggactgcagccttctcatcatgaacgctcctgtcaaggatatctccgcggatgaaaaagaaactctgaccgattacctgaaaaacggcggccgcatgctgcttcttgccggctgtacccaggatacattgtccaatcttactgatttcatttcccagtacggaatggacctgaaaaatggatttgtggccgacccggctccccagcattactacaacaataatccctttaacgtaattccggattacgactttgccagcagccttctctcaggaattgattcctccgcagctgcccttctggtccagcctgcgggtatgaccatacaggaaaatccttcggaggacattgtggtccagcccttcctgactacctctgattctgcatttttagtggatcctgccacgcaggaaaagacgcagggcacttatgtgctgggagctgtggccacggagactgtaaacgaggaagaaggcacatcctccatgcttaccgtcatcacagcgccaagcatgattgatgattccatcctgtcacgtttccccagcatcaccaacctgactctgttcatgaacgccgcggccagcggactgcccggagtcacaccgctgtccatccccagcaaaagtctggatattacctataatatggtaacatccgccggattgtggagtgcgctgtttattatcgtgattcctgtcattttcctgattgcaggctttgtgatttggctgaagcgccggaagctataaatcacgtttatacgcatcacatataacatgcatcgcacgtaagtgaccggaatacggtcacttacgtgctcataaaaaggaggttaaacatgaagaaacatatacggccaatggttcccgctctgggagccctggtccttctatgcgcagcctacggcattatcacctggcatcaggggaggaatgctgaatcacaggccctgacaccggaaaatgcttctgtatatatgaccgaccttccggagctgtcttccctgtcctggacaaaggacggcaagagtctgtcctttacccgggaaggcggtacctggtattataaaggggatacggactgccccatccgccaatatcccctgaccaccctgtcagatactctgtcccacttaaaagctgagcggaagctggaaggcgcggattctccggaagcatatggcctggataacccttccgtacggtttgataccgtttcctctgatggttcttctcactctatcctggtgggaagccaggttcccggtaccggcggttcaggcccggacggttcccagctccccgcccagtattatgcagctatggacggggacagtcagatttataccatcggcagttatctgaccgaaacagctgccaagggactttatgattttgttgagacagaatcccttccccatgtggctggtaccgacatccgggaaatcactgtatccaggaacggacagaccagacggttctataagaagaccgtggatgacgcaggcaatattgcctggtataaggactctgacgcggacgaggccaaccgcctggatgacaatggcgctcttaataatctggcggatgccataagcggtttgtcgttccagtcctgtgtatcatataaggcaagcgatgaggaattgggcagctatggcctgtctgagccgattatgacgctttcctggacatatgaaaacggagaggcggacggcgccttatcattggccattggaagttccaccgaagatggtacaggctactataccagaaaggatgattccagagccgtgaatctgatatcaaaagaggcggcagagcgttgtctcaatgctgcctacccaaagtaatgtgaattatactatgaagttgtgctaaattatgaaagggaaacaacaccgcatttctgcctgttgtctcccttttttataactgttctaatatatggattgcccttaagccccttccctgcgctcccccgcacctctgtcatggagcacaaagtggttcttctgaaaatccagtatcccctcagcccgcatcttactcagctcgctggacatagcgctccggtccacacagagatactcagccagctcctggcggttatggggtatgtcaaaatccctgcccccttttgccatggcctgctctgacagataggacaaaagcttttccctggtggtcctgcggcacacatgctccagtttgttttccagcttcacattgtgctccgacaccagacgcagcatgttgtgtatgaacctggtatggaaatcgcaggccagaggacaaaatgtgatcatccgctggtaattgaggaacagagtctcgcatcccccctctgccaccacgctcaccggcagcaccggggtcctggcgcaggaataggactggccaaagagctccccttcctttatatgatatatgtgttcctgatgtccccagaaattctcctggataacgcatgccttccccctcagcagaaccagcaccttattgacggattctcccatgcggaaaatgtattccccatcctcataaagcacctgctccgaggcacagcattttaacagggtatagagctcgtcatcatttatgccataaaatagcggagattttttcacaagaggcagccattcctccatattcgcccttctttccgttgcatttacaactcttttgctgtaaatattatataatcaagagatttttccgtcaagagggattttttgtgagataaaatctcattcaacatcaccggacatcatccatttcagctgttttttatatatcccaatgacttttttcatggcctcctggccgggagcccctatggtaaggcgcttctccacacaggtcttcatactgatggcctcatatacgtcctcctcaaacaccggactgatggccttgtattcttccaggctgagatcatccagggcaattcctttggcaatgcaagcaaggaccagctgtcccacgatgccgtgggcatccctgaaaggcactcccttattcaccagataatccgccgcatccgtggcattggtaaagccgttctttgcactggcctccattacctctttccgaaagctcatagaggaaatcatgccggtaaacaaggccaggcatccctttactgtgtcaatggcgtcaaaggtaagctccttatcttcctgcatatccttgttgtaagccagaggtatccccttcatggtggtcagcatggataccagggcgccgtatacgcgcccgcttttgccgcggatcagttctgcgatgtccgggttctttttctgaggcatgatggaacttcctgtgctgtaggaatcatcaatctccacaaaacggtattcgttggtattccatattatgatttcctcgcagaacctggacaaatgcatggagatagtggacagggcgctgagcagctcaatcaggtaatccctgtcagccactgaatccatggaattaagggtcggcccgtcaaatcccagaagctctgccgtgtattcccggtccagaggataggtggtgcctgccagggcgcctgagcccagagggcagtaattcatgcgcctgcgtatatccttaaggcgggagcggtccctggagaacatctcgaagtaagcgcccatatgatgggccagggtgattggctgggccttctgaagatgggtgaaaccaggcatgaaggtgtctgtattcttctccataaccgccagcagctcttccagcagttccttcaccagcgcttcgatggcgtcaatctcatccctggtatagagcttcatgtccagggctacctgatcattgcggctgcgtcctgtgtgaaggcgttttcccgcctccccaatccgctccgtcagggtaccctctacaaaggagtggatatcctcatatccggaatcggatgatatagccaatttcccattatccaggtcttctaaaatgctttccaacccgcggataatatcatccctgtcctgttctgtgagaattccctgcttggccagcattttcacatgggctatgctgcccctgatgtcctgacggtagaatttctggtcaaaggaaagggattcgttaaaattgtgtaccagttgattggtctctttcgtaaaacgtccgccccataatttcatggctcttatctccttatttctaaatttcttttatcctgtattcctgtttgctgcggctttcctggcctgctgcggctttcctatttaccgctgctttcctgtttgctgctattttcttttttctggctctttttgttctctttgctgttctttcttatgctgtatccgcttactgcacggtcctttttcttcttccggctgattcccaccaatacagtgactcccaggacagccgcgctgactccggtaatccaagccccggtcctaagtccctccggttcataggaaaagctgattcggtgggtcccttcaccgatgtccactgccagaaacgtgtcaaacattttccgcggggtcacggccttgccgtccaccagtatggtccatcccttatcataaggaatgctggtatacataacgcctgccgtatctgcggtgatactgcctgacaattccgtatccgtccacctggaaagcaccataggattctggttcatttttccgtaaacagcctccagggcctggggattaaaacgccacacctctgcctgcagggtcgggctgccgtcatctcctgtctccaggcgcacctccacatccttgttgatacggcccagctccatgaagtagcccctgtccacattatcaaagctctcggtctgctctccgattacagccgtgacctcctttaccttcttattggtcacatacacgtagtaatcgccggtttcctgggctgtaaatgtaagtttcctgccctctgtcacactttcgttgggaagcagtacatgctctgtatccagcacatcgcagagatcgttctggacatgggccgggttcccggaatccaaaatccagtttccttccacatccgacggcagcataaatgccacgggcagggtaaatttattctcatacagccacatacttccttttctggcggacaaatccctaagtccatcggcaggctgctggtccccgtatatgccataacgcacggacatcaggctgtccaccagaggcgtgcttcctgtgatgctgtaggcattggtggagctttcacaccccatgctgcggaagaaatccgacagggaggcattggctgtggatgaaaacagggatacggacgggaaattcatccaggcgccgtcattctttgtctttctgtctgtcttttccacacgatagaatgtatccgacttaatattccacaccagatcctccacgtcctggttatctttcacataagaagttctgctggtggtaggaatgctggttaccgcggtattcacagccgcctcaatggcaaccacggccagagcagtgagaagaatggcgtccagactccattttcccttgtggtacaggtaaatcagacctccatatatggcaatgaacaggagtgccgcatagaacacggaaaaatggtattgttccggattatccaccagcttctctgccagcagcacaaaggaaacagccccccaaaacgccaggcataccgatttccaggacatatcctccagatgaatataggcgtggtaacacataaacagcatcagtgcaatataaataaaggactgacggcagggaaggctgttgggatagtggaacccatgccagataaaattcagtacattgactgaaaagctggcgtaaaacagaaccagcatggagcagtacactgccttttccctgaaggtaatcttcctgctgcccaggtataaaaggaagaacataagcactgccacaccgcagtatatattgggccagtggtccaatcctatctcggttcccacatttcctatatgacgggcaatcatatcaaagatggagaaataggatgaaaaggttttagggaaatcaaaatcccctgacgccgtgacctgcagcgcataaatctccggcaaaagcaccaccgcggcaagaccgcctgccagaagggaatagaaggcaaaccgcagccctgttcccatgaactccccgaagcttttgggcggattgagcgtcatctgcgcaatcacatagataaccataaaaatgcaaatcatgatggaaatatagtaattggaaaggatggagaggcccagcgtgatgcagtaaagcgtccccttcttctcctttaccagctgctccagccccagcagaatcaacgggaacagcatgatgcagtccagccacatgatgttccagctgtaagcagccatataaccgctaagggcataaaaaataccgaaaaagcccacgccgaacttcttaactccaaagtgtttcttcagataccatgaaaagctaaggccggacaatcctgtcttgagaacaatgagtatggtcataaactcaatgataaacttcttcgggcataatatcagaagccagtttaccgggctggccagataataggcatagagcgcagaaaaattcacccccatgccgatatcccagctgtaaagcaggcttcccccatgggtcagcttatactggaactctgaaaaaaacggggcatactgatggtacatatcggtcctgagaaaacactcttccccaaatggaaagatacctctctgggcaaatatgataatcatggccaccactgggacaaaaaatgctgccacaagaccatctgaaggcttcagcagccggagtccgcgcctgttttctgtctgtgacatccctgtctctctcttatcgtactgctgcctgtcctgtccggcagtctcattctcttcttccattccgtattcgtcttcctctgatgtatattcgtctgctgtatatctatccgctatataattatctgcggcatatttatccgctgcatacttatctgccgcatatttatccgccgcatattcatctgcggcatattcatctgcggcatatttatccgctgtatacttatccgccgcatatttatctaacgcatatttatctaccgcatatttatctactgcatatttatccgctgcatacttattcgccgcatatttatccgccgcatatttatccgccgcatcatattccgaagcattttcctctgatgaatcatcaccgaaaagatacgcctccagtgtgccttcttccgttaaatattcctctgatgtcgttttatccccgccggaaaccggctcctttgagagcgcttcctcccgggctttatcctgcatggtcggttctggctgcacaagcttcaggattgcgtcaagctcccgttcaacccgttctatctcttcacgttccatcacagtcacctttctctattcaggcttattcttgaatatccagagtttgctgaaaatatagttcagtaccatgttgattacagaggatgtgaatttgcagaacagctcatacagcattcccctgtcgccgcctaatttcaccatgaccaccatgagcacccaggtaacggctcctgagaacgcccgtgcagccacaaatgcacccacttccttcacaaggtaggaaggccgcagattataattgcggaacacaataagcttgttcaccacataggcaaacagcacagccgccagccatgacatggcctgggacaggcctacgcctatctcaatctgcctcagcagggcatataccgcaaaatcaactgccgtggtgagaaacccgcatataatgtagcttacagtctcgtagttaacacatttttcccatagtttacgtaacattttctgctcctgccctgttccagagtgcacacacacaatccctggagcaataatcccttctattatatggtagcatcatggaattgtaaagaaaaaaccattatctgtccaggaaatcctcggctcccctggtgtaatggagttccccgtcttccgtaaggaatatgccatagatttggtccatggattctatgagtctggtgccctcttccaatcccagtgcaaagcaggtggtgctcagtccgtccccgtccactgacctgggggaaatgatggatacctgggtcagcccattttcatatgggtagccggtagccggatccagtatatgatgatagttgacaccgttctccacaaaatgcctctcgtacacccctgacgaaaccactgacatgtcgtctattttcaatgccgccactgtctctgtatgagttgcgtacggcctctggagtcctattttaaaaggggcgccatccggccgttttcccacgcagagcacatttcctcccagattgatgaccgcacttttcacaccgttttcttccagatatgccttcatctgatctgctataaaccccttggctatggcgcccaggtcaatggttgtctcatcattgagaaaggtgacctgtctgccgtccaggagcacgttttcatagcccacctttttaaggtccgcctcaatctcttcctcaggcggcacatgaggcgtctttcctgtaaaatcccacagggaacttaagggctctatggttatatcaaaggccccccgggacatacggcagtactccagcccctccgacagtacctgggctgttttctccgataccgtgatggtcctctcgcccggcctgcggtggttcagtttgtaaatctcgctgccctccagggttttgctgagcagcttctcatagtcggaacagagtgtcatgcagccgtccagaatggtctggtcctctgaatcgtataaggtgacggtgacaaatgtgttcaacaaaaaagacgacctggtgacaggatccgcaactttcttgctgcatcctgccagccaagccgtgcacatgataatcaaacctgctgttattattgtctttaatcctgtatttttcatgccttacattctagcacccgggcatgtaaaagtcaaggcagccccatcaggctttggtctcttccatgtactcatccatcacagcgtccagaatattcttaagtgtctctggcgctctgcctcccaccggcgtgccgtcaatctcattggcagccacacacagtttggtggatgatgtcaccagaacctcgtccgcatccatcatctccttcagggtatagggagtctcgcttacaggaatctccagtttcttacaaatgcgaatcaggtgggctcttgcaatgcccggaagaatcagattgtccgcaggagccgtgtagagaattccatccttcaggatatggcagttgctatgggcacattccgtcacacggtcgcctctgtggaacactgcttcctggcatcctgcttcctttgctttctgggcagccatgacgctgggcagcagattcagggttttgatgttgcagtgaaggaaacgggtgtcctcctgggtaagcaggcgaatcttcttgtacaggtccggtgttcccatgggctttaacataacccagagattggctggtacattctccggaaattcatgggttctgacagcggtacccctggttacctggaaatagataaacagatctccggtatccatcttattgaccaaatcctgaagcagcgccttcagctctgcctttgtgcacggcacctgcatcttgataaggcctgcgctgttgaagaagcggtcaacgtgctcgtcaattgcaaaaatcttgtaattgcggcagggacctgcatcgtatacaccgtctccaaaccagcataccctgtcattcatgggaacgctcatgttctccagttcgtcgtactttccattataatatccaagcgttttcatatatgtaatctcctttataataaaatattcattgaaacatgatgctaaaaccgctttttctcttcttccggtatggcggaatacatgtttttgatttccttcagaacgaaatgggtcctggtggcagacacaccgggtatgctcttgatggtgcggtggatgcgctccagctcatcggaggaggcgcaggatatcttcagcacaaagtcataatctccggtcagatagtagcagtccaggatattagggtgatccatgatcacctcggtgaaggagtcatggaacctgggatgttccaggctgatttccattagggctgtgacatcgttccccagggccttggcatccacccttaccgtatagcccttgatgatgccggactcttccatcttcttgatgcggtccagtacggccgatacggacaaatgaatggctttgctgatgtctgaggctgtctcccttccgttctcttttaggatgttcagtatcttatagtcaagtttatccatcttgtccccctgttattttagcttttcaaatgtgatttcgtagtatatactggtaggtggatagaatgcattttctgcactgccctctccgtgactgcccggtacgcagtgcgccttgccgccgggctatgccctttgtccgggtcacaggcttcgtggacattataacacaaatcatccaggagttgtactatgaatctctcttatttgaaatatgcggtagaagtggaaaaaactgggtccatcactaaggcggctcagaatttttatatgaatcagcctcatctgagtaaaatcatccgtgagctggaacgtgacctgggctgtgacatcttcgacaggaccagccgcgggatggttcccaccaagaagggtgaggagttcctgcgctatgcaaaggcaatcctggtccaggaggaacagattgaggccctgtgcgtgaagaacagcgaaaaagccctggaggtgaatctgtgtgttcccagagccacctatatttcctatgccttctctgattttcttaagcatatggacagctgtccctctgtcaatgtacattacatggaaaccaattccagggacaccatccggggtgtgtcaggcaagacctttgacgtgggcattatacgctgtcaggccctgtatgaatcttattatatgaagcttctccaggatgagaacctggagtggaaggaactgtggcaattttcctgcaatgtccttatgtcccccagccatccccttgcctccagggacaagctgacttacctggattttaccgattacattgaaatcgtccagggcgacatccagaatccttcctttacctttgaggcccaggatgcctctgccaccggcggcaactccaagaaaaccgtttccatctatgacaggggaagccagtttgagctgctgcgccagctgcccggttcctatatgtggacctctcctgtgccttacggctgtctcacctcctcaggtttgattcaaaagacatgcagttatcccggaaacatccacaaggacctgctgatttacaggaacggataccgcttttccaaggaagaggaggagtttctccggtgcctttcacggatggtaagccgtctttccgattgacccgccgggcgcacgtacataaaagcccgtcagccccttcattgagcggctgacgggcttttcgtttactcttaaatcccgttttttcctatttagtttgttcctatttatatagtgtaatccgttttaccacgacccagagagaatcctcgccagctcactgtcctcgttcagtatgacagtcttattgtcccctttcatggaagccttaagggcatccagggatcgcacataattatagaagtcggcctttgcctcgtcattgtaggcatcgctcaatatctgcatgtatctggcctcgccctccgccttgatcttttctgcctcagcgttggccttggctatggtctcctttaccgtcttatccgtctcattcttaatcagggatgactggtaatcgccgtcagccgtatactgggccgcgatgttgtttcgctcagatatcattctctggtacacggactccttgttggaatcgggaagatccagcttctttgtctccaccgcatagatgtggatgccataggaatccatggcatcaccaatattctccgtgatggtcttagccaggttcccatcacggcctgatataatatccgcctggttggtggaggaaagcacatttttgatggagttatataccacgttccccagcctgacctccgccttttccttgctggcgttcagggacgccagatatttcaccggatcattgatatcccatatgacgaaagaatcaacggtcattacctttttatcctttgtggttacatcgcttggatacaggtcggaaatcatcttatacttaggtatcttctgcacagactgcaagaagggaaccctgagggatggtcctgccgaattctctacccggaccacctttccgaactgaataatcagggagtactcgttggattttgtgaccaccagcggattgaaaatggtgacagccaggagcacgataacaatgattcccatgtttctcataaatttagtcaatgtcttcattactgtccacctccgttctggtcattgccctcatacaattcctcctggtcataggagccggactggctgccgctgtcggcccctgcctgatttgcccgtcctgtctggtccggctgatttgcctggctgttgtatgaacctgccaaagagccggtgctgctctgggttccggagacaaaggagtccaggggaagcatggtctgtgtcccgtctgatccgtttatgatgaccttaagccctggaaggatatcctccatggtctcatagaacatcctcttctttgtaataagaggatactttgcatattcctggtacatatcgttgaacctggatacctgcccctctgcctcgctaattctctgctggcggtaggcttccgcgtcccttgcagccttgtccgcctctgcattggctgccggcagccgctcggactggtacttcctggcctcgttgattttggtatccatgccctgtttcgcatcctcaactgccttaaacgcattgtttacagcgtctgtaggcggctgcgcgtcctggatggtcacattgttaatacccaggccgatgtcctcctgctccaggcgctcagacagcagtgccttcaccttagcctgaatctcggatttgccggtggtgatgacctcgtccacgctgtaggagcccaccgtatccctgatataggactgggccaggttttttaaaatcggaatggccgtgtcgctgtggatatacgccttaatggggtccacaatctggtactcaatgtaaaaatccacattcacaaagttaaaatccttggttatcatctctgactcagacgaaaccgttatcggattgttctcgctgtccgcatggttctgtgcattgtaatccgggtcatatccaatgggcatgcccttgatttccttggacatcttatgtaccttctgtatgaaaggcaccttgaacttgggtcccgaggtagtgacgctgcttggacggccaaaggtggtaagcactgccatctcgttctctgacagggtatagaaagaatcaaaggccgcaatggccagaacagccactgcaatggctatctttatggggcggagcatccgcttcatcctcttattgctttcttccccgttgtcaaatactacttccggtccctgatcttttttaccacctccaggtcccacgaacttcttacccatgaaaaaattcatccggtattcccctttctcagtcattttagagaagtataccataagtttcacataccggatagcatttctctccagtttccaatatttttataattccgttcgggagataccggaaaaggaataccggtattcctttttcatacctacccattccaggtcaaaggtgttaagatataatcgttaaagaaataacacaccaaaacaacattttacatatactgggaggtattatcatgagatttacactgccaagagatttgtaccatggaaaagatgcactggaagcccttaagaccctggccggcaaaaaagccattgttgttgtgggcggcggctccatgaaacggtttggttttctggacaaggtagttgattacctgaaggaagccggcatggaagtcaaattatttgaaggcgttgagccggatccatctgtggatacagttttaaaaggcgctgctgccatgcaggaatttgaacctgactggattgtggctgtgggcggcggttctcccattgacgcggcaaaggcaatgtgggcattctacgaataccccgacacatcctttgaggacctgattacaccattcagcttcccgacccttcgtaccaaggctaaattctgtgcgatttcctccacatcaggaacagcaactgaggttaccgcattttccgttattactgattataagaaaggcatcaaatatcctctggccgacttcaacatcacccctgatgtggctatcgtggacccggccctggctgagaccatgccaaagaagctgaccgcacacacaggaatggatgccatgacccatgcaattgaggcttatgtctcaacccttcactgcgagtatacggacccgttagcactccatgccatcgagatgattaacgagtatctgataccttcttataacggggatatggaagcccgtgataagatgcacgatgcacagtgtctggccggaatggcgttttccaatgctttgcttggaatcgtacactctatggctcataagacaggtgctgcatattccggcggtcacattgttcacggttgtgctaatgcaatgtaccttcccaaggttataaaattcaactccaaagaacctgaggccgccgccagatatgcgaaaatcgctaaatttatcaaccttcccggcaccacggatgaggaactgacagatgcccttattgcccgtctcttagagatgaacaaggccctggacatcccggcctgcataaaggattatgaaggcggaatcattgatgagaaggaatttatggataagcttccaaaggttgccgaactggccgtaggcgatgcctgcaccggctccaacccaagaaccatcactcctgaggttatggaacagctgttaaaatgctgctactatgacgaggaagtagatttttaactgcccccttttgtgttacactccatatatacggtttgtttttactgcccgaaaagggtgggaaagaattcgtctttcccacccttttcacattactattttcacgctgccagaagctgttccatatagcgcagatacccgcacagccctgtaatgatgaatatttccagaaaactggtgataaagcctgcttccaggaggaagaggacggagcaggctgccatcatccacaggatgccccatgccctgcgaaaacgcatccggtcgcgggagctgagaaagcggaggaagccaatgatactgaaggccagaagcacaggtgaaaaaaatgcaagcagcacatggaggtctgccttcaggggatatttctccggcatatagggaatcataaccgccatgagaagaaaggctgccgctgtatacatcagggtcctgcctcccggattcctgtatcttcctatgtgaaaaagataacggacatacacacagtaatagatgccggtggcaaatccccacaccgcaaacagcagcttgttgccggtgcggttgcccaggacagacaggttggtaccggtccagctgtcaaaggaagccaggaatatggtcacgccgggaatcagataaatcgtgaagaggtcgtattttccttgaaaccgtacattccggccctgcatggtcctgcctcctttatcagatagtccctgctcttaaatctgtcccggatcgcctgctatccgcatatccgggacaatgaggaagggagcgcgcacatctgcttgcgatgtgccgctccctatcattatctgatgaagtgctgacttttacacttgaatcattttcctttgaaggtatctgacctccaattatgccattgtttttaaaagcttttccacagaggagagctttacgcagagtgcaaacagctcggcagccgttatcaaatcccccaatgtgggataggtgggcgcaatgcggatattgctgtcatggggatcctttccgtaaggataggtggctccggcagatgtcataaccactcctgccttcttgcatctggccacaatatcctttgcacacccctccagagaatcaaaggagataaaatatccgccccttggctttgtccaccggccgattcccagtccttccagctcacgctccaatatctcctccactgcctcaaattttggccggatgatgtctgcgtgctttctcatatgctctaccatgccgtggatatccttaaagaaacgggcatggcgcagctggtttaccttatcatggccaatggtctggttctttaactgggccttgatatcctccaggttattgtgggaggtggcaatggccgcaatgccggaccccgggaagctgattttggaggtggaagcaaacttataaaccaggtcaggatttccggccctcttgcactctgccagaatttcaatcaaatgatcctggtcatggtcatacaggtggtgtacgccgtaggcattgtcccagaatatacggaagtcggacgcggccggcttcagccttgcaaaacggcggaccgtctcgtctgaataggaatagccctggggattggagtacttgggtacgcaccagattcccttgatggaatcatcggaagccacaagttcctccaccatatccatatcaggtccatcctcagacatgggtacattgatcatctcgatgccgaagtattctgtgatagcaaaatggcggtcatatccgggaaccgggcagaggaatttcaccttatccagcttgcaccagggagtgcatcccatgattccgtgggtcatggccctggatacggtatcgtacataacgttcaggctggaattgccgtaaatgataatggtggaaggattcacctccatcatatccgccagcagtaccttggcctcgtcaattcctgtcagcacaccgtaattgcggcagtctgtaccgtcctcgcaggtaaggtcgctggtgctgctcagtacgtccatcatacccatggaaaggtccagctgctccacacacggctttcccctggacatatccagcttcaggtcctttgcctgaaactcatggtactgtgctttcagatcctggcgcagtgaaagcagttcttctttagtcatctctgcatatggcttcataatatcctcctggctcactatattttctataaaatgtgtccgtcaggcatacatctgtcagccaccggtcaacattttcgtacattgtacacaagcatacaccaataaaagcattccgtcaatacaaaattttcttatattgtcaaaagatatacttatgcctttttctatctgtctctatcacagcttatacatctccgccggcaagcagctcccttacaagctggttcaccatggacggatccgcctttcccttcatcgccttcatggtctggcccaccagaaatcccatggccttttccctgccgttcctgtaatcctcaacagactgcggattggcagccatgaccgcctttacggtgtcccgcagggcgccctcatccttcaccaccttaaggccattttcctccacatatgcctcagggtccgcatcgtgcctgaatatctcttcaaacacggttttggcaaccgtcctgttgatgatgttgttttccaccatgcggataagggcagccagatgggaggtggagaactccatatcctccggctccatctcctgttccttcatcaaacgcatggcttccaccataagccagttggatgcctccttgggccggccgctcaagcgggtggtctcctcaaagatgtccgccatgtgcttggaactggtgagaagcctggcatcatactcaggaagcccgtattcctccttgtacctggctattttctccgtgcgcagctccggctggcgggccttaaccctggcaatccactcatcgcttatgaccaccggcaccagatccggatcagggaaatacctgtaatcctgggcatcctccttggatcgcatggccttggagctctccttgttgtcatcccagcgccgcgtctcctggattacctgcctgccctcttccagcagctcaatctgacgcctgcgctccccctctatggctctggcaatggccttaaaggagttcaggttcttcatctcggtcctggtgccaaactcaggggcccccgcctctctcacggacaggttcacgtccgctctcatggatccctcctgaagcttgcagtcagaggcgcccaggtactggataatcagcctcagcttctccaggtaggctatgacttcctcggcgctgcgcatatcaggctccgacacaatctcaatcagagggactccgctgcggttgtaatccaccagggaacagtcctcccactcatcatgaatcagcttgcccgcatcctcctccatgtggatttcatggattcccacgcgtttcttaaggccggactccgtctctatgtccacccagccgtcgcggcagacaggcaggtacagctgggatatctggtagttctgcggattatccggataaaaatagttctttctgtcaaatttgcagtactggttaatccggcagttggctgccagccccacagccagcgcatactccaccacctgcttatttaacacaggcagggagcccggcatgccggtgcagacagggcaggtatgggtattgggcgctcccccaaaccgggtggaacagccgcagaaaatcttggttttggtggccagctccacatggacctccaggccgataacggtctcatactgtttactcatggctcctcctctctgccctcccggtcaaggcgccggacggctccttggccttcccggcagccaaaagagacagcttccactcccgtgttttctcgtaagcataggcggcccggatgatatttttttccttaaaacagtcgcctatgagctgcagtccaatgggaagtccctttgaatccaggccgcagggaaggctgattccgggaagaccggccaggttcacggaaatggtatagatatcccccagatacatcttaagaggatcccccagggactggcctaaccgcggggctgttgacggcgctgccggcgccagtatgacgtcataggacgcaaatgcacggtcaaattcctttttaatcagtgcctttgtgcggagagccttcagataatatgcgtcatagtagcctgaactcagcacaaaggatcccagcatgatgcgtcgcttcacctccggtccgaatccaagggaccggctctttttgtacatgctgtgaagcccctcgtattccggcgcccggtagccgtactttacaccgtcaaaccgggacaggttggagctggcctccgcagaagcaatgacataataggcaggtatggcatactctgccagcttaaggtcaaaggtctccacaatggcccccttttcccccagcaccctagctgcttccagcacagcgtccttcacctcctggtccagcccctgcccaaagtaggattccggtatgccgatgcgcattcctctgacatcctctgacagggctgaggtgaaatcacaatccctccgctccatggatgtgctgtccttggggtcatgggaggccaggacctccaaaacagcggcgcagtccgacacgtcctttgccacaggccctatctggtccagggatgaaccataggcaataagcccatatctggacacggtcccgtaggtgggcttgatgcccgtgacgccgcagaaggagctgggctggcgtatggaaccgcctgtatcagaccccagggcataaaagcactccccggcagccaccgccgcgcaggaaccgccggaggatccccccggcacatgttccaggttccacggattcctggtaacaccaaaggcggaggtctccgtggtgcttcccatggcaaattcatccatgttggtctttcccaggataacggctcctgcctgctccagattggaaactgcctgggccgtgtaggtgggaatgaaatttcccagtatcctggaactgcaggtggtccgcattccctttgtacacatgttgtccttgatggccaccggtactccggccagggggcctttcaaccttcccgcctcaatgtctgcctggacctttccggcctgttccatggtcttttcttcatttacggttacaaaggcgtggacagatggctccatggcctttatcctagccagagatgcttctgctgcctggaccgcagtgatatcccctgactgaattcgtcttcccagctccagggctgtcatatctgatatgctcatgttcccattcctcctatcctacggtcttaggcactttgaatgctccgtccttttgctggggggcgttggagagaatctggtccctctggtccgtgcctgtgaccacatcctcccggaacacgttatgcaccggaaatacgtgggacataggctccacgccctgtgtgtccagttcatttaacttatctatataatccagcatccttcccatgtccttctttgcttcctccttttcctccggggaaagtttcagctttgccaggatgcctacatactcgattgtctcgtcacttatgatatttgccatgatttcctgctcctctcagtcattttcctgtccctatggctccagcctggtcacatcccttgggaacagtgacgcctccctgacattctgttcatccagaagcctcatggtaaggcgttccagtccaatgcccaggccgccgtggggcggcatgccgtatttgaaaatcataagataggaagcaatgtcctccggatccatgccccgcttctccatcttggctgtgatttccctgtaatcgtgaatccgctgtccgccggtggtcacctccagcccccgaaacaaaaggtcaaaactcagagtgaatctggggtctgccgggtcgtccatggcatagaagggccgttttttggaagggtaatgtgtgacgaacacaaaatcgcttccgtactcttcctggaaataccgtcctatgagcagctcctcctccggctccaaatcgtaggggttgcgtatcttcctgtcatattttcttgaaacaagttcctttgcctggtcaaaccggaccgctggaatccgtcccacctccggcagggtcacacccagcatatccagctccttcttataatcctgctccaaaagtttcatgacatactggagcattcccgtctccatatccatcacgtcccggaagctgtcgatataccccatctcgaaatccaggctggtgtattcgttgagatgccgggtggtattatgtttttcagcccggaacacaggcgctgcctcaaacaccctgtcatatacgcccaccatggtctgtttgtaaaactggggactctgtcccagctctgccttcttattaaaatattccagtttaaatacgttggagccgccttctgctcccctggccacgattttaggagtgcgtatctccgtaaaatccctgcttaaaagataatccctaaatccccttacaatgccttcctgaatcttgaatttggcccgctcccgcacgtttcgcagggagatggggcgcagggaaagctttgcctccagggatgtgttcagcttccatttgctgaccgcaagaggcaggggctctgcaggccgggacagcacccggatttcctttaaccgtatctcaaaaccctggggcgcccgttcctcggcctttacaacacccattacctccacggcgctctcttccttcaactccctgatgtcaaaatccgtaatcccggcctcatatacacactgcaccagcccccgggacttgcgcaggatgacgaaggccacctcgcccatatggcgtgtggtatgaacagccccgttcatccgtatttccttgccctcatattccccttcaagcacttccctgatatccaggaccctcttctccttaactccgttcacaaattccatggcactctctcctcgctatgagcacttgacatctgtcttttagatgtctagtacaaactggatttcggttccggttgattttcttttccatggacataagccggcttctggtccacaaataaaaaaacgccccggaacacagtaactgcattccgggacgggattcaattcagacatttcccgcggtaccacccgcattgagacctggtcccgcagcagactgccctgcgcttccagctcccctctctatgtacgtaacgtgtacaacggatatacctactatcagccgtgtcctggccgcttcgatataccagctccagagtgttcccttagcccagtcctgcccggcggcgctctcagtcggtgacgcccccttcctgtcacatttctcaggccagagtctctttcattgctgttgattatttatttactaaaatagtacatcactgaatcaaagtcaagggcaaatattttttcgggatgaattttagataatttcacaataaacatgtccatgtctgaatatttattgtaacaattgaaactgtctgccgtcatcccataaagcggatggaaagcaggtcccggcatgtcatatttttactccgctctgcatagactgcaatatggaaactactatacatataaaggagctcatgatgttatccatccatgattttcattattcctccgatgcaccctatccacccatcaaagcagagtccgggaatccggcctatgcaagggtgatgttggacaacataggcgggagcaattcagaaatgtccgccatatccctctatgtcttcaaccaactgattaccggatacaatcccgatgtcagcgctgtattccacaaggtcagcattgtggaaatgcaccatctggaaatatttggcaagctggcccagcagctgggagaggagccgcggctgtggactcagcacggatgtaagaagatatactggtcccccagctacaaccagtatcccggagagctgcggaccctgatgcgcaatgttatcgacggagaaaaggcagccatcagcaagtaccagcaccagatttcctacatacgggatgaaaatatcaccgaaaacttaaggcgcattatcctggatgaacggctgcatgtggaaatttttgaaaaggtttacggagcgtattgttcctgaccgcccttaagcatggcgtatattggtaaactccgatatctccctgctgaccgtgcataaatcatccgcatccatgtcgtgaatgttgtcatgccctgtaatcctggcaaatgtctttatctcctccagggataccctgaggaaattagccactctctgcgcggccgcgtcctccttgaagcggctgcgcagtttctcgtcctgggttgccactcccacgggacacattccggtgccgcatatgcggtactgctggcaggcggctgccatcaaagctgcagaagcaatagccaccgcgtccgctcccatagccagcgcctttgcaaaatcagaggatacccgcaggccgcccgttatcaccagctgggccccgcagcctgcctggtccaggtatttcctggccctgtaaagggcgtaaatcgtgggtacgctggtggaatccctgataatcttggggctggctccggttgcccctcccctgccgtctatggtaataaagtcaggtccggcatagacgcagaattccaagtccttctcaattcttcccgctgcaatctttatgccgatgggccgtccgccggatacgaggcgcagcctgtccaccagggccttcaaatcctctttggtgtcaatgcccggaaagcgcgacggactgatgacatcctgtcccaagggtttattccttatggccgcgatctccggcgtgaccttgcctccgggcagatggcctcccatgcctggctttgtgccctgcccgatttttatttcaatggcgtctgcttccctcaggttctcgtctgtcacactgtactggtttggaacatattcaaatatatacttgtaggccgccgccttctcctccggcagtatgccgccctcgccggagcacatggctgtgcgggccatggcgcttcccctggacagcgctgtctttgtttccctggaaagtgctccaaaggacatgtgggaaatataaaccggatggtccagcaccatgggcttggccgcatgttttcctataatggtttctgtttttaccggagcatgttcatcaagcggcatggggttcagctgggcccccagaaacaggatgtcatcccagcccggcatgggcatctgggttcccatggctgcaatgatggactgtccctttacagccatctcatgaatttcgtccatatagcgggcatcggtctgtgtcctggcatactcaggatcataggcagcagcctcccctgtactgccgccgcagtcctggcatgtttcccgggttccgtcttttttaacgggcttctccttttctctgtccggagccttggcgccggcccctccatcctctgccttcaccagcttatcggctgtgaccatgcacacgggacagacttttaaatcagatacaggaactccctccttctcctcatcataaattgaaccacagaatctgcaacggtatactgccattatgtttcccccttctctaaattattgtcaataatagtaattattactgttttaaatatagcacaaacaacccgcaatgtccagcgttttatgcccctatatgtcattgacttaccataataagtaatgttacaatatcttttatgcacaaacgagaaaggaagtcgcactacatgtcacaagaaaacaaaatgggcgttatgcccattaataagctgcttatatccatgtccctgcccatgattatctccatgctggtgcaggccctgtacaacatcgtggacagcgtgtttgtatccatgataaaccaggctgccctgactgcggtgtccatggcatttcccatccagaacctgctgattgcagtatccgccggaacctgtgtgggcgtcaacgccctgctgtcccgttccctgggagaaaaaaattcaaaggcggccaatctggctgctgccaacggcctgtttttggccttcttaagcttcctggcctttgcagtattcggcctgttcggatccaggctgttctttgaaagccagacaaacaacccggtcatcattgaatacggcgtacaatatctccagattgtctgcattttctgcttcgggctttttggggaaatgatgttcgagcggattctccagtccacgggccagaccttttactgtatgattacacagggcaccggggccatcatcaatattatactggaccccattcttatcttcggcctgtttggagtgccgaaaatgggaatccagggagctgccgcagccactgtattcggccagattgtggccatgttcctggccctcatcctgaaccactccaaaaacaaggaggtgcggattaatttccgttcgttcacccctaactggagaactatttccattatctaccaggtaggcgttccctcgattatcatgcagtccatcagctctgtcatgacctttgggatgaataaaatcctgattggtttttccgagacagccgtagccgtattcggagtatatttcaagcttcaaagctttatcttcatgcctatattcggactgaacaacggcatgatacccattgtggcctacaactacggggcccgcagtaaaaagcgcatcatggaaacggtctggctgagcatcggcattgcagtgggcatcatgctcatcggactgatggtgttccaccttatgacgccccagctgctcatgctcttccaggcagacgaggagatgctggccatcggcgttcctgccctgcggattatcagcctcagcttcctgttcgcaggatactgcatcatcgtgggatccgtgttccaggccctgggcaacggcgtatacagcctgattatatccgtggccagacagcttgtatgtatcctccccctggcctggttttttgcccggacctttggactgcatgcagtgtggctctccctgcctctggctgaaatcacctctgtggtgctcagctccatcctgttccgcaagatttatctggataagataaagcccctgggacaggcggctgcctgacggatgccggctgctgatttatgtttggctcacccatatacgaaacgggctgtccgggaacagattatattcccgaacagcccgtttgccgtcctgatcttactgcctactctgccgcataattcaatctcaccgtaatattggcagtcttataccgggagctggtgtccaggtacccgtcgtagctgtaggattccgacccggagttctttgccgtaatctggaacacgcccagagtggcgcttaacagctttcccgcctttgcccctgaaccggcagacatgatgtcaatgcgctcctttgcattggcagtggccttctcaatcaggtccagcttcacctcatccagcttggtataataatactccggcagctcagactcaaactctacccctgattcgatcagcttagtgatatccctggagatattctccaccttgtcaatatcataggatgaaaccgtcagactctgggtcaggtcatatccgtccggctcatctcccagatacttgccctcctcatcgtatctggatgtataggtctgggaaatattcacggaactgaatatcatctcgtcatccgccacctggttttcctccagatactgtctcaccagttccgcatccttcttgatgatggcgtaggcatccctgggcgtatcgccgtggacagaaaagctgcctctccacacaatcaaatccgactcaaaatcacagctggcagaaccggttgccgtgattccgcttcccccgccgctcttcttataatccaccagtccgcctgtaaagatgctgacgcagataatggcgctgagtgccgcgatgactgcgataatcacagacctgccctgagccatgaagcctgtcttttcttttttctccttgttctcttccaatctctcacaaacctccttttatatacatgttcctgcaaacctgcacgcccggcgcaggatgtggtggttttagtatagcatgtaaaaggaggaagagacctgacggctttcttaatatttacggtcaaaatagcaggaagcagaaaacaggcgctgtatcactcccctatcaggacatccagccgtttcagggcctctatgtatatcaccatggcattggtaaggttttcaatcttcacacactcatccggctggtgaccgccgccgcggcccggagggcagggctttttctgtcctctgatgcccggcccaaaggcgaccgcgttaggcagtttcctggcataggtgccgccgcccatggaataagcctttgtctctgtccccagcacctggcggcacagggcggtcagctcttttaccaccgggctttccggatcaatgacacagggcgggttatcccggctccagtccagaatccatccgtactttccggcttgtgcgctcatctgctttaccagtgcttccgcgccggcagtcaccggataacggatattaaagttctggatgaaccgtcctctctctgtcctggccatgcctcccaccagggtaagactgccggacagcccatcctcaaaggcaatgcccataccttccccgtaataatcagcaaatccctggtccaggaaccggaagcaggcttgttcctcctctgtcaggaagggggctttggccagcatatgggccagcttcaccgccgcgctgtcagaaccctcgggaaaggcggcatgtgctgtttttccggcagcctttataacgatctggctgccgccctctacggtaaaatcctgggggttatcaaggctgtccacataatcccggaccgcatcgcagcttgtccggctcagccatacccgtgcctctgccggaaccgcattggacgccactccggccgaaaaaccggtcacatggccctccggtatggcgcatgaaaattccccttccaggattcccttttccccgtaacacactggaaatgaggcatccggagtaaaggaaaattccggcgcaggataatgggaggtatagtactcaatgtcctccatcccccgctcttcactgcatcccagatacagccgtatggtgtgttccagcgggacttcctgttctttcagatatttcatgctgtagagcgcggcagcggcaggccccttattgtccgcgcttccccgaccgtacagccaaccgtcctttatcacaggtttgtagggctctgtcgtccatccgtttccctcatgcaccacatccagatggacaaaaatgcctatttcctgtcctgtccggcccggcatgagaatacttccgcagcggtaatcatggttttccgtctcaaagcccatttgcttccctatctccaacgctttgtccaataccatggcgcagccctccccgtagggatactcccttgttcccggttcgctgacactgcgtattttcatgagctccatggcagtatccagcatattttctctctgggacaatacccattcttttacatccatatccttattttcctctattcatagcagttcagacggcacatcatcctgccgtctgaatttctgcttttattcatcatacagatgacaggccacaaaatgcctgtcccccacatcctttaattccggcacctgaacacggcatttttccgttgcataccggcatctggtttggaacctgcagccctggggcgggttaaaggggctcggcacatccccctccaggtggattttgttgtactcaatatccatatccggaatcgggatagccgagagaagggcctgggtgtagggatgttttgcgtcttcatacagcgccttcttgtctgctatttccatcacatttcccagatacatgaccatgatccgatcacagatataccgcaccacgctcaggtcatgggaaatgaacaggtaggtcaggtccagctccttctgaagatccatcatcaggtttaacacctgggcccggaccgatacgtccagggctgatacaggctcatcgcacaccacgaatcttgggttgagcaccagggccctggcaataacgattctctgccgctggcctccggagaactcatggggatagcggttcatgaattccagcggaagccccaccttatccataatttcaatcaccctggcttccttttcctcctttgaacccatggcaaatacatccagcggggcgcaaatcagctccctgaccgtcatacgcggattcagcgaggaataggggtcctgaaatataatctggagctccctgcgcatctggcgcatctcttctctgccgtattccgccagattctttcccctgtaaaccacctgtccctccgtgggttcatgaaggcgcagtatggtcctgcccagggtggacttgccgcagcccgactcccccaccacgcccagggtttccccgtactccatggaaaagctgactccgtccagggcctttaccgcccgcggttccctgcccctgcgcttcttgccggagaaaaagtatttttttaaatttctgacttccagaattgtctcgttgccgctcataccttttcctccttaagattctcatacttccagcagctcaccttgtgtccgtcatccgtgatatacaccggcggctggtgctccctgcatttgtccatggcctggaggcaccgggcgcagaacctgcatccctttggcatcctgtccagggacggcaccgtaccgtcaatggaaaacaggcggtccaaatccttgtcaaggcgggggatggaggccagaaggccctgtgtataaggatgcatggcctccttgaatatctgtctggcgcttccgtactccatgaccttgcccgcgtacatgaccatgatgtagtcagccatctcagccaccactcccatatcatgggtgataaggataatggaagcattgatgttcttcttcagctccaccatcaggtcgataatctgggcctggatggttacgtccagcgccgttgtgggctcatccgctatcagtagggatggactgcaggacaatgccatggcaatcataaccctctgcctcattccccctgacagctgatgggggaattccttcagcctctgctcaggagaagagacaccaacctttgtaaggatatccagggcctgcttttttatctcgtcctttgaaagactgctgtgtacggaaatggtttcctccagctgccttcctatggtgagcacaggatttaaggatgtcatggagtcctggaatatcatggaaatctccctgcctcttatccggcacatttccttattcccttttttggcaatatcctcgcccttataaaggatttcaccgcctgccacagaacccactgcatggggaagcagctgcaggatggacagggaggtgacgctcttgccgcagccggactcccctacaatacccagggtatcgccctggtttacggaaaagctcacatcgtccacagcagtcacggtccccctcttggtcctgaactgtgtctttaaatgtttaacctctaataatggctgtgccatattctacctcctctgcagggccggcaccgggaatatcccggtgcctttgctgcgtcatgactattctacatgccattcccaaacggaacggttcaaaagactgtaatcctcaaagcatacattggagattttcttgttgtaggcaaccaggtccttctggaaatacagccatacaaacggacactgttccctgagcatcatctggtactcatcatagtatggcttcctgtcctcaaagctgaactggttcaggccctttcttcccacctcgcccagggacggatcctcgttctgggagaagttattcagatggcccggagtcacgttcatcacgctctcgcccgggtcgggtgaaccgccggatccaatcagcgcaaaatcatactcgccctttcttgcggtggacagcagggtcgggtggtctgtggtgatgatttccacgttaatgccaatctttgcaaggtcctgctgaatcatgggcgccgatttctcgcgcacctcattgccctttgacacattgaggcggtaggtcttgctggtatcaaatccggattcctccaccatctgttttgccttgtccacatcatatgggatgggaagaagttcttcattaaagtatctgtggcttggagccagggggcccggagccggtacgccttcgcccttcatcaggttattgaccagggcgtcgcggttaatggccatgtttactgcctggcgcacttcctggggaatgttcttggtattgcaggaaagatactggtaacccagggattccactgcctctgtggtcaggttttcctgctgtcccgccatatcccagtcatttaacgggatgttgccgatgcctgcgccggccacaatatcaatctctccgttcatcagacctgacagaaggttggacgccggcacgattttaacaacaaagcggtcgaattcaggagcgttgatgtggtaatccttattagccgtgaattccacgcgctcgccagatatctcagactcgtaaatgcatggaccggaaccaatgggggctttccagaaatcagctgccagcatgtctttcacaggaatgtcctccagacagtgctttggcaggatgtaaaaatcgcggaacatgatgtccagcatataatccaggttggtggggtccttcagtgtgaactctactgtgttggcgtcaatggccttcacgccgaattcctctccttccacacggattccgtcttccgtaccggcaaagggagccaccttggaacggcgggccacactgatgtcagggttggacatgagttctgcggtgtataccacgtcgtcagccgtcacaggctgtccgtcatgccacttggcgtttttgttcaggttaaatgtaatcttggtatgggtctcatcatccatggaccaggaatctgccagacggggtttaaaggatccgtctgcctttaccacaatcagcttgtcaaaaatcagctccagcacggcgtccgtgttggcattggtggtgttaaagggaatcagggtgtcccacggggccgtcatggccatggtcacgattttctgtccctgggaggcagtgttctcctgggcattgccgtctgcgctgccttccgccttggcgtccccgccttcggctgctgttcctgttgcggcaggggccttggtatcgctgggcgctgaaggcgctgaacagccggacagtcccatcataagacacagggcaagagctgtcatttttgttaaacgttttctcattactatatcctcctttttattcaagccttttcggcattgattttgaacttattttcatgtatctatttgatcaccattttggtgtccagggcgtccctggctccgtctcccaggaaattgatacagagcacggttatcagcagggccaggccgggcggaaaccagagccacggtctctgggaaagtacgctgatggactgggcatcatagaggatgtttccccaggatgcctggggcgcctggacccccattcccaaaaagctaagggctgattccgtaataatggcctgggctgcacggaatgtaaatgaaatgagcaccggggcaaaggtgttgggcagtatgtattttgtcaggatagtgccgtcctttgtgccgatggccctggccgcctccacgtaatcctgttccctggccgacagcacatttccgtagataagccttgcgaacttaggccagcccaggactccgataacaatggtaaccgtggccacagagggccccagtacggataccagcaccagaatcagaaccatggccggaaacgacatgaacacatccgcgcagcgcataatcagtgtctcggcaattcccctgtagtaccctgccagaagtcccaggggcacacccaccgccatactgatgactgcggatatgatacccacacttaaggatacccgccctccgtaaatgaacctggcgaagatatcccgcccgatatcgtctgttcccagccaatgaagggcgctgggcgcggaaccgaacatcacctcgtaatccgatgtatacgggtccagatgcagtatgtagggcagggcaatgaccagtatgatttccagggtcagtacaaaagcgcttaccatggccggtttgtgggcgcaaaaacgctggagcacgtcatgaaaataagaatttgccggaatatcctttaatctttcatcctgtttcatgttctcaccttccttcttcttagtcataacgtatccttggatccaacagtccgtacaccaggtctaccagcaggttgcccaataacaccacaatggcaatcaccaccgtgatgcccatgataacaggataatccctggcattgatggactgtaccatcagacttcccagcccgggccatccaaatatctgctccgtcacaaccgcccctcctatcagaaaaggaatctgcatgccgaaccaggataccagcggaatccatgcgtttctcaaagcgtggcgcaccagcaccgacggctcatgaagcccctttgccctggccgtgcggacataatcgtcctggagcacctccagcatagagcccctgcactggcgtatgaggcttcctatctgctgaatggccagaaccacggccggaagcaccaggtggtggaagaacatgggccaggtcctgactccggaggagtcgtacatgccggaggtagggaacagcttcaccttgatgcagaagaaatatatcagcaccagtcctgcgaagaaattcggcatggcggacccgataaatgacagtccggaagaaatataatcccagccggagtagggcttataagccgacatgattcccaggggcagggcaatgataatggtcagggccatggcgcttcccgtaagaatcagcgtgggccctatccgctccagaatcatatccagcacctggccgttggtgcggatggacattcccatgtttccctgcaccagctgcaccagccatctgatatactgtatgataaccggctggtccagtcccagttccttactcttccttgccatctcctcggcagtggcataagggtcgttaaacaggatttccaacggcgagctgggcgccagggaggccaccacgtacaccagaatggtgatacccaagaaggtagggattgctgtcaacagccgtttcgcaatgtacctataacgttccatctgcatatcctcctcatttcatattttaaaaattccgttgccaaattttttatattggcctattataatattaaaagcgattctctctcccttcgcttatctcaatgcaaaaaggagttatacatggacaaccagtcaccgaaactatccttaaaggacaccgtataccagcagttaatcgagctaatctgccagggaaagctgctgcctgacaccctgttcacggaaaaccatatgatatcctacttcggggtcagcaaatcccctgtcagggaagccttaatccagctatgccatgaaaatgtactgaaaagcattcccagatgcggttatcaggtgactgccatcagcagtaagaatgtccgcgatgtgacggagctgcgtctctacctggaactgtccagcctccccaaggtcatggagaacatcaccacggctgacatcgaagagctgaagcgccagaaccaggtgcgcctggtaaatccggaaaaaaaagatttgtggatagcctggcgcaacaactaccagtttcacatgacggtggtgcgcctggcaggcaacgagcaggtgaacaatgccatggagcaggccatgaccacctaccgccgggcctatgcccagctatacaccctgaaaaaagatgtaattgctgccaataaagccagttaccacgacttcttcgtgtccagcctggaaagacacgacgtattctcggctcatgagtatctgaaaaaagatatcctgtttatggaggatgagctgctggggaccggcatcaccacctgatgaatgccggttccggttttacctctgctccagcttttccactgagtccaccacgcaccggatgcggtcataggcgatttccgtgggaagggtgcagtctgagcccacgataaagggccttcccttcatctcctccagtacctcactggtatgtttaaagatttcttcctttgtcccggtgaccaggactccgtgcctgtccgggaatcctcccagaataatactgtcactaaaaagcccggcgccctttgtcaggctgaaatcatttccgtaaatcccccagttcacaatggccgggtgcaaatccttatatcggttaaagtcaatattgctcttgcatatgtgcagcacattgaaatccgttgtctttttgatgtggtcatacaccattttctcatagggggccacaaattcctcaaactcttcatctgtaaagaaattccgctctcctcccagggccgcatagaagatgccctccgcgccggcctccagggaacaatctgaaaattccataagagtctcagccacggtccggaatacctttttcatctcagccggacgttcccggcagaataaggtaagctggtatcccatactggtgtagttgcctgcaaaacctgtctcatggaaggcggaggcaataaggccgtggatggtggacatgatgggatactctccctttgccttgtcggctatcctcttgataatttccatctggtcctggaagatggcatccttcctggaaaatcccctgaacttgctgatgtcacccagccgctcaatttttgtattcccgtcatacaggatattttcattcatgattttcaggatatcggtatccgtggccttcatgaagtccagatgggcctcaatggctttctcaccatgatgcatttcttccggaaaatgaagccagaatcccacaggcgtcctgtccactggttttccttctaatacatttctgatacgttccctctttgtcatggtttccattttgttacttcctttccctttttgatgcatgtatatgtatattattctctctgttgatattatcaataatattatcagttagggtgtatgtcaagcattttttgtgttatttggctattatcaataaaataattcattaaatttgtacatttattctatatctaatatgttttataatattatcagcacggggtaatttttgaatgtgagaaaggaaatttttatgaatatttatgaccagcgcattgcaaaagcaagaaaccgcatggaggatgccggcatttcactgctggtcatcacgccttcatctgatcttatgtaccttacaggctactcaaaaccagccacggaccgtctgaccgccctgctcctaaccgaacacgactcctatttcctgtgtcctgccgtggaaaaaaactatttaaaagaggtagactgccaggcagcccccattttctgggaagacagcggggacccatttaaaaaaatgtactcggtcctgtccgccgctcccggcatatccaggaaatcctgcataaaagcagctgtggcaggcagaatgcagagcagctgccttatccggctcatggaactgtatcccggcatttcatggaacaatgcagacagcgtcctggttcccctgagaaagagcaagacgccggaagagattaccataatcaggagagcacaggaaatggccgagagggcctttgccagattgctggagaatggcctggaaggaaaaacagagcgccagttgtcagaacagctgatgaaactgcgtctggaggaaggctttgacgcagtaggccccggcctcattgcctgcggtccgggcagcgcctccccccatcccatcctgtcggacaacaaggtacaggcaggagacacagtaatgttcgattttggcgggacctataagggatatcatgcagatatgacgagaacctgcgccgtgggatatgcatcagatgaatttaaagaggtgtattccattgttcttgaagcccacttggctgtcctgaaggcagctgccccgggcacggcctgccgtgatatggacctggcaggccgcagtatcatagagcaggcaggatatggggcatacttcacccacaggctgggccacggcatagggctggatattcatgagccgccctttgcctcagtcagcgaagaaggtgtattggaaaccggaaatgtaatctccaatgagccaggcatctacctgcctggacagtttggcttacgtatagaggatttaatcgtgataacggaaaaaggctgtgaatcccttaataccatgacaaaggaactgatgattgtttagaaggatggccggaaatccgtatgaatggccggaggcaggtacggatgccggggctattgggcattactgccctctcttccacttcttgatttcctccagcctgccttttacaggttcctccgcgccctggtccgtaggatgataatattcccttccggccagggagtccggcaggcactgcatacgggctatcttttcctctgtatcatgggcatacacgtagccgtcgccataatgcagatctttcatgagtccggtaggagcattgcgaatggtaaggggcaccggctcagccagcatgttctgggcgtcagtcctggcggattcataggccatataggcagaattggatttaggcgccatggacaggtaaatcacggtatggctcagatgtacattacactcaggcattcccagaaaatgacatgcctggtaagcagacactgccagcgtcagagcctggctgtccgccattcctatgtcctcgctggcaaagcggaccagcctgcgggcgacatacagcgggtcctcccctgcttccagcatacgcgccagccagtatacggctgcgtccgggtcggaattgcgcatggacttgtggagcgcggatataaggttgtagtgttcttcccctttcttatcatacagaaggctctttttcccgatgcactgcttcagtacatcctctgtgaccgtggtcttatccggactgattaccccgtttgtcactgccatttccagggtattcaaagccgtcctggcatccccgttggcaaacccggcaatcatatcaatcatagggtctgtgatctccacattcagataacccagccctttaggactcttaagcgctgtctttataaggcgggccaggtcattctccgtcaatgcctggagcacaaagaccctgcaccgtgacaggagagcgctgttgatctcaaaggaaggattctccgtggtggccccaatcagaatgatgcttcccttttcaacatatgggagaaacgcgtcctgctgtgccttgttgaagcggtgtatctcgtccacaaataaaagggtcttaattcccatcctccggctgttctcagcctggaccatgacctccttgatttcctttatgccgctggtaacagcactgaaattaatgaactgggcattggtccgctttgctatgattcccgccagggtggttttgcccacaccgggaggcccccagaaaatcatggatggaatcttatcctgctcaatgagctggcgcagcagcttcccctttcccaaaagatgctcctgtcccacaaatccgtccaggtcttccgggcgcagcctgctggccagaggattgtatacttctctgtcatcgaataatgacatctgttccatggctttttatctctcctttcagaaatggatctgtatgattactaagaaaccggatattctcatgttctagtttatcttactgtgattttgccgtatacgggcaaaaagctggaattgtattatcacagacggcaaagcatactatattcttcccctttttcatccacaatttcaaatcctgttttttgatacatattcacagcataatttgctttttgtacggaaagtgacgcctgcttatatcctctgtctttcagaatacggagcatttctttcattaaagctgtacctattcccaatccacggtaatctttatacagggaaactgcaatagacggagtggcattatctatatgtccgtaatcattcataatacgtacccaaacagcgcccacagcctttttattaacctctgcaaccaaaccaatatcgtcttttttcgtcccgaagccggttatatatatctgcaattccggctgactgataatggatttgggcggtgcaggcactccctccggcacaaagacagcctggtacaaaaaatcttgaagcaggctttcttctccctctgatattgttctgattttgtagtccataaccgcctcctgcagttttcaattaacagaggaattcgccctctccataacctggaatttctttcactatttctttttcttgttcattacaatagctattgtaatcgctataacagcacaaataataattaaccaaaaatttggatgcatatctttatctcctctgcaactgctgatatgccgggtaatctgcccaagtcaggcaaacaaataacttgcatataacttgcttttttcattctaatcttagcgcatggaaatgtcaaacagctcatttcgtttcactgcttcacgctactgtccatattctgtctgctgacttgggcaccattatggcactcaatttaccttttccggattggttttcacctaatgattgtgccaatccctgaaggcaaattcctcatccatttcatcatatgcgcattccagcaaatcagatccccatccgtctgaaaactgaaaggccatgaaccgcccctgcaatgataagccttccggaatcatggtcttaaccaacccttcaaagttgaacatgggaaacaattccctaagcctttcttccacatctgttttatccacggttccattattgggtacgcagtcgaattcatcagcccactggaaaacttcggctgtttcttttgagtatacttctttttcccggaactccccgcctccatttttcatacgccccggtataaccgcttgttctatctcccaaaatggatatccgctgcctgttaagtcactgaaaagccgatataatatacaatcattaatttgcttttcattctccctgatttccttttccttttgattgtagtacgcagtaagacctctggctattccgccactgtctgctgtctcagatttaagatagggaaacagcggcttgtaccaaaaggagtcctcatcctgcaattctttcatgatttcctctaacgtatcgttaatcatgatattctcatccccaaaatcctcatttacatagtttcctgctattcctatggaaaagctgcccttaacaagaaagcgtttgtctctatagattatttcaatcatatatgtgttactcctttgtttatgttggtgttttttgggcggatgttatttgcagaggggggtatgcgcttaacggattccctgttgatcgggatactgttaatatgttcttttaactgatgttttgcgaattctcaatatataattatggctgctttcaatgcattaggtacgcggggagcaattttccttttgcattaatttaggggcttacaggtatcttttggtctgcaaggctctcgcgagcctcgacgatttatacattttagtctgttatactatatatcatttcaatccacaaggctctcgcgagcctcgacggatttgctggaagatggtggttgcctcatgcgatttcaatccacaaggctctcgcgagcctcgacaacgcgatcctgccaatactctgccgcctttacaatttcaatccaccaggctctcgcgagcctcgacgatgtatatggtcaatcatccgctccgggagtggatttcaatccacaaggctctcgcgagcctcgactttccttccagaatattaaggaaaggtgacataatatttcaatccacaaggctctcgcgagcctcgacactgaaaaaagtactagaaacatatatcttttgtatttcaatccacaaggctctcgcgagcctcgacgaggaagtttctctggttatttgcaggagtacagatttcaatccacaaggctctcgcgagcctcgactttgacctccctcctatagcacatgtccttaaaaatttcaatccacaaggctctcgcgagcctcgacctgggaatacggtaaaatgggagtaggaataagcaatttcaatccacaaggctctcgcgagcctcgacccgcagcgcatacggtgcactatgtaggcgataatttcaatccacaaggctctcgcgagcctcgactatcgttgtagacagcacagagactggaaacagtgatttcaatccacaaggctctcgcgagcctcgacaataaacatttctcccagccattcaaccggtacaatttcaatccacaaggctctcgcgagcctcgacagcgcccagcacatccatattactgatggatagtatttcaatccacaaggctctcgcgagcctcgacgcaagcgcatcattataattctgagttgctgactctatttcaatccacaaggctctcgcgagcctcgacatgtcgccctgcgcatccagggcaatgctgacaatttcaatccacaaggctctcgcgagcctcgactcttccagaagactggtacagccgggacctggatatttcaatccacaaggctctcgcgagcctcgacagcaaaattatccaaacctactccacatcccccctaacattttatgcattatgctcttttctccccagttcaaccaattcagtccattcacccagcccgctttcacggccttttcctctgtttttcaggtgcgaatctcccaggcatttcatgtcagcttggcattcgcacctggtttgaagggctcccaactcacagaaaccaactctacttatatattacataatccttcatttcccgcatatatcctgcatgctgcaaagcctctgccgcctccgccggatactctttcaatacaagcctcttttgttccggatatatggctccctgcttgaacgcacgaataaattccgccatcacttccttcatatcttcggcatcgcaaatacgcagtactctgccctgacgttccattacagcagccagctttcccgccttcagggccaccgctgttccggccactgccagaaatccacatttttcaggtagttccagaacttttccccacaccagggccggatctgttccgtttaaccataccgtatggtcatccggctccctcaatgcgccggtcacggcatcataatcctctccgcggacaaattgggctcccgacatcccctctacaaaataacctctgcggatgcggcctgtatattcccagatacgaagaatttccaatgcctgggcccagctccactcccatttttttccatcttctccggtcaggacatagggcgagtctgacacagcctgtacagactttctaaaagtctcacggcacagaatcatattttcatcaaaaaactgctccagccattcctccggtccatattttcttaccggccttactatatcccaccgcccagctgacagtgccatgaccctggtattcacacgttgtctcacagcagctttctttaccttgtcctgattctgccattgccttacaggcacaaaactgtctgcacataccaggcccttttcagccagacttaacaatacttcctgggcgctgccttcctttggtatttttgtaaggaatttaagaaaactggctcctctgcgctttaactcctggtacatgagaagctcatcgcccttaagccctgctgtctctgccccggcagatgcctcccagtctatatcctcataactgcaaaaacaaagggttccttccggcgacattctccagaaatagtccccctgggccagcagccggtccagaagactggctccataccgctccacccgcctggcaaagtacacattttcccaaaagcgtacagggcatggctttctgcatcctttttccacggcttcccttaactgttcttctgccgtggaatgtgtcactgccctggctgccatcagcgcggcgtaatgaaatgcgggctgtgtggctgtctgactgcgcaggctgcgtatatggccttccctggccctctcatagagcttttcgtgatagtatacgccctggtcctccactgcttttttgctgccgcatagtttatctaaaagcgcctctgtcatttcctcagacagaaaataccgttcccttacatccaccgcagtctgaccgccgcggtaatagagcatacgccggacgatgtgcattgcggcttcctcatcctgctgctgcaatgccctcatatattcgtcctcatgttctgccgctatccagattcccggctccacataacaggccagtccctgccgggccagggcctccagccagtcagcaggtatatccagctctcctgcctccaaatctccctccatcatgagaagcgaatggagctcctcctcattttccggcatttttctccgtgaccatcccctggacagttcctctggtgtaggcttaagcaatgcttttttcaaatcttcctgcacggtctggcggattttaggcgtcaccggtgaatactcatacatctcttctgcctctgcctgccactggaagggtagagacatgggagaagggacatccagccagatttctctgaccgtaatgaagccggaacggatcctggccagtatctccatcactccgctgatatcccactggtgttccagacattcccgttttgtctcacgaatcagcggatggtccggctggtccatcagggagcttaacatttccgtgctcttaagacgctgcatccaaagcggctggcgcccgttccgtttcatgcccatcatcagggcacgggcagcattgtagcggaatgtcatgccgaacagaggcgtatcaggcaggattgcttccagcaccggccgtacctggtccgggttgatttggaataaaagtccttccggcaattgctccctgccgtatggatacagaaggaagccatcctcctcatccacactccccacatccatccccatggtattgcgtatcatatgacgcaggaccagggacagcggaccatttacccgtcttccaaacagagcatggaccatgacctggtggcttcctgtactgtccttaaaatgctccaccactatggttctgtcatcaggcagtccttctgtggcctgaatctgacgtgttataaatccggacgcatggaccgacgcagactcgtctaatcccagtttctccagagctttttccagctctccctcacggcatgccttctccagctctcctaatatacggccaaaggcaagactggttctaagatctcttccctttgtctcccctttccagaatggaagtctggcgccttcggccggggcctgggtcacgataacagagtccttatcctgacggaccacacgccagccaaaggaccccagcatgaaccggtccccgatcctggattcatagacaaattcctcatccagctctcctaacttcaccccgtcctctgttttggctgcgtacatccctttgtcgggtatggtccctcccgctgccgtggccagcatacggctgtaaacatccccagccacccggccgtgaatccggtcatacaaaatcctcggacgcaccggtatctcccggctgtgttcgtaatctcctgccagcatggcaaggacgtcctccacatccttcctggtcacctggtaaaatggatacgaccgctccagcacatccatcacatcatctatgctgtagctctctcccgaagccatggaaaccaaatgctgggccagtacatccagacacatgcgcggaggattggcccgttccacgcctccacggcgggccacttgtgcggtcatgccgcagtatactgattcgggcgcagtcctgggatacatatacatgacgctgacccggcccggattatggccggcccggcccaggcgctgcatggtgctggaaatggtgcgggggcatccgacctgcagaacctgctccacatcccccacgtcaatgcccagttccatggacgacgtggcacataacagtctcagcctcccctctcttaaatcccgttccacctcatccctctgttcctttgacagacttccgtggtggactctggcaaacccgtccccgcccaacagatttacatagtatgccagcttttccacataacgccttccttcggaaaatgcaattacactcttacagcttaagcactggcggtatactgccattcccagctcttcccataccggatccttccgccttcccacagcaggggccgtaccaataacctgtatatccacctgtttatccatggaaggtgcacagataacggccggttccggggacaggtaggcggccgcaagctccaacggctcaatggtggctgacaggccaattctctgaagcctgcggccgcaaagtttatccagcctggccactgacagcatcagatgcgcccccctcttggtgtctatgagggcgtgaatctcgtccaaaataattgcctttgcagtctttaacacctgtcggccggatttggatgtcagcatgagataaagggattccggagtgataatcaggatgtggggcggatgctttaccatcctctggcgctctttctgaggcgtgtccccggtacggatggcggtctgaatctgccctatggatggattacccggtctgctttccgctttgctttccccgggagcttccgctccgatcccctccaaaggtttgcgtaaattttccctgatgtcccccgccagagacttaaggggagacacatatatcacatacagctcctccttaagttcccccctctcaaccagtccgcccaactggtctatgaacaccaggaaagctgaaagggtctttcctgtaccggttggagcgcttaccagcacgtgctttccgtcagcaatggcgggccatgcttctctctgtattttggtgggttctccaaatgttttcctaaaccagctttcagtggctggcaggaattgtttaagggtatcctcttgcataagctcctccatgcgggcagttgtgtgtcattcctgttgtccggattatgttccgtaaaactacaggtatttatattattatatcattgcactgttttgcctgtctatgactgacatggcagaactgcctttctgaaaggtcttttccggtctttcatttgcagcagttccggcgccgcctgtttccttaaccctaatcttattgtataatatactcatatcaataacaggctgaatcagagcctgtgggaatgaaaatctgaaaatacagcagaaatctgataaaacaaaagaaaggaacaatcatggacaaacggaaaacaggcatttttcttctcatattcctgcttggactcatagccggattcctgctctccagcgcggtgagaggacatgcagccgcagatacttccggttcccggatatccggcagacaggaaaacgtcccccttataaccaccggagaggactcagcactcccggcttccccggaacaagctgccgtcagcatatctgctccccaggccatcctgacctccggaccgtcctatcctgagtgggacaaaaacaccacctatacaggcggcgatcaggtggtctgcggcggtaaaatatatatagccaggtggtggaccttaggggagcttccagggcaggccgatgtgtgggaagccgctccgcagacgccccctcccacagattcccaggccgctcccaaagccggcgcctcatccccggtaaaggtggtgggttattaccctgactggaaatcctaccagccccaaaagctgcagatggatgtgctgacccacatcgcctacgcatttgccatacccacaccggacagcagactgctccccctggaaaacccggaaacagcagtccgcctgatagaggatgcccataaaaaccaggtcaaggtcttattagctgtgggcggatggagctataacggtgccgagctggaaccagtcttcgtgagcgccacttcaaccagtgaaaaaaccaggcagctgggtgatgaaatactggccatgtgcaatgagtacgggtttgacggcgtggacatggactgggagcatcccagggtagacgggccctccaaggaccagtaccaggagctgattctttacctggcagacgcgctccatgcccagggaaagcttctgaccagcgctgtcgtcagcggggtcagcgcagacggcaatatttattatgatgccgcggcccatagcgatgccgtgttaaacgcagtggactggattcatgttatggcctatgacggcggtgacggggaacgccattcttcctatgactttgcagtaaacagcgccgcctactggtgcggcacaagaaaaatgccggccggtaaagtggtgctgggtgttcccttctacggacgtcccggctgggccggttacggggatatcctggccgctgacccggatgccgggaataaagaccatgccatggtgagtggaatggatgtctggtataacggcatttccaccattgaaaaaaaggccgcgtacgccaggaataacctgggcggaatcatgatatgggaactgacccaggacacggacgattccggcaaaagccttctgtcagccatcggaaggggcatacaatgatccctatgtcccgctgtttatccctgcggattgtaaggacatttttccttcaggcactgttcattccggccgtacaatccgcatactgtctttttgggccgctccatccatatcccgaatttctcccccacaaaatccactgcctccagtatggctgtgtaggaatcccgtttacagcatctgggtccccctgttttggcaatagccccaaggcttctggaggtcatctcattgcaaagcccccactcttttccgcttaagggtgaggcccctgtaatcaggctgacaaaaatacctgtactcacagcagccccgcaggttccccacaaaccgcagatacctcccggcacctgtgcccctctgttcctcatttcttccagggccgcgtccaaatccagttctcccccggcgttcttataggcagccagaagcgcggagcccaccagcacatggtgctccggtccatgcatatagatatagggagacaggatgattttcttcatgattgccaccggatccttgctgtctgtatgcctgcatatatcttcaatgacacgcaggcccatctgctcatggcagctgtcgcagataaagtgaccgttcacacatctggcattgctcataaatgttttgtgacagtaggtacattccatttcaatctgactcgggaaatattccagcggcgcaccgcataccaggcatcccgttgtttgttcttccattgccgtatcctcctgttaaccattcatttcttattcttaggccaatctcatttcagtataccataatccctatcccggttaatacttatttttctgtttttatatcggttttcatatccacttcctgccctccgctgttccccctccccgccctcttcctgacggttcttaccgcaaatcgaaaaagagcgcaaaccgcacggaaccgctcccgaaactggtttgcactctttttctctactctctgctcagggtagcgcctgacctggctgtgttcaccaggcgggcgtaccggccgagaagccccttttctcttggacgcctcactgccttccattccctgcgtctggcttcaagctcctcgtcgctgacctccagatggaggtaatccttatacaaatccacagttatcctgtccccatccttaaccagggcaattggacctccctctgctgcctcagggcacagatatccgatgcttaagccgccgctggcccctgagaaacgcccgtcggtgatgaccgctgtgttgggtattcccttgatgatttccgtaatccggtgcagctccttcattcccggacctccctttggaccttcatagcgtacaataacggcatcaccttcctttatctcctttgcccggaaagcagcataacactcatcctcgccctcaaataccctggccgtgcccttaaaacgccgcacttccatgggaactgccgatgtctttaccagggctccctggggcgccagattgccatagagaacctggattccgtctgccctagatacaggatcgtccatggactttataacttccctgtcgccctgagacgtacgctccagaatctgccccagtgtttccccagtcactgtcagcacatccttattcattaccgactccagctctttcatcacagccggtattccgcctgcatagtgcaggtctaccacggtccggtttccgttgggtacaatggagcacagtaccggcgtggcagtggtaatctttgaaaaatcatcccagtccagggaaatccccagctctgccgccagtgccggtagatgaatcagggcattcagggagcctccgatagcggaaagaagggtgatggtattctccagcgcctcccgtgtcataatctggctggggcgaatctgcttctccaccatcttcatcacagcccgccctgattctcttgcgctgaaacggcgcatgctggtgcttgaaggaatcaggcttcctcccggcagcatcatacccagggactcacagagagcgcccatggtattggctgttcccagaaagggacagattccggggcccgtgtaatatttgagcgttccctcaatcagctgccgctctgttatctctccccgcaggaactgctggcgcagttcctttgactcattgggttttatctgggcatagcagggaccggccgtgacaatgactgaaggaaggtcaatccgtgctgctgcgttcagcattcccggcacgattttatcgcaggaacccatgtacactactccgtcaaacactccctcgcccaccaccatggcctcaatggaatccgtgatgatttccctgtggggcagacagtatcgcataccggagtgcccctgggcaataccgtcacacatggctaccgtgttaaactcaatgggctcgccgccggcttccaggattcccttctttacctcctcagccagctgttttaaaggctcatgtcccggacatatctcattccagctgttggcaacggcaatgagcggcttgtggtccagggagtcgatggaaacgcctgccgatgccagatgggccttggatatggctttctggaacggctccaatttatcaattgcccgcaacatcatttcctcctgctaacattgttttcttcttgttataacgattcatgaacacccatacggctgccataaccgcaatcagtaccggcacaaaaatgtacggcttcttgatgaatgcctcgtacaccagaaagcttaccgtaaggctggtggcagcgaaggatgtaatcattccttcccccaggtccagtcccacggaggtggccagctgggtcaggacaggcgctgtagccgtacctgccagcaggatggcccctgtacacaccaggcccatgatgatgttcttaaacaggtttcctctggtaatagcaaccaccagggccacacggaaggtcacaaccgccaggtccgcaaagggaagcacgcggtttcccggaagtacggcagccataaggatggttagcggaatgacaatcagggatgtggtgatgacatcaggatttcccactacaaccgccgcatccaggccgataaggaatttcctgcccttaaacttctcctgggtaaactttttggcagcctctgagattggcataagtccttccataaaaagagaggtcatcttgggaatcaataccatgacagccgccatgtttacgcccaacgccataatatcagccactgaatacttggccagaacaccgataacgcagccaagtaccaggcccatgatggtgggttcaccaaagaatcccagatatttcttggcatccttgatttcaaaatcaatcttgttgattccgggtatcttatccagcagccagttaaggggtgctgcgataatgatggaggaaagagctgacatggttgggagggatacgccgggaataccgaagtaatcctccaccagaggcgcggtccagtctgacagcttaaatgtgataatggccatgatgaccgttgcaccgatacccattgccacatttttagtcacaaaataaaccatgattcctacgattgccatgtgatgataattccagatatccacatccagggtatctgtggccttcagtaccagcataacaatgttggtggccagaatacagaatataaggatagcgataatcggcgatgaccatgtaactgccgcgatggctccccagcccacatccagaatgtccagcttaataccgaaattctgcaccatggcctgggcggcaggccccagattgctcttcatcatgttgatgaccagattaatacccgcaaagccaatgccgatggtaaggccgcttctgaaagcctttgataatttcacccggaaaataagccctatgatggttatgatgattggaagcatgaccacagcgcctgcatccagaatcgtattgaaaatattataaagtatctgcatatgattaatctcccctaagatttcatttgtctttcatagcctacggctgtctgtcctgagcgcgtttgagacacactcaaacccctttttatttcagatgggacagaatctcatccagcgttgcatcctcattaattcctgtcagcagggaaatggcgcctaccaccgggatattcacattgccgcccgtaaactttcctgtggtaaccagcaaatcaaaatcatccgccttggattccacctccagaagcttgcactgggttacagataccgggattccgttgtcttcacatttctccctgattttggttgccactaccgttgatgttgcgattccatttccacatgccactaatatacgtttcatttttattttctcctttgatagtctcttttagttttcatcttccagcagatactgcttgatgattttatggatggtgtcaggctgtcctgcctccactatgtgtttcatatcctcctggttctgaatcagctttacgattcgctgaagcatctcaatatgtccgtgggcctctgtcagggccagcatgatgaccaggcttaccggtacgtcattgtcaggctcatccatggccctgaagggagccggtgtcttaagcaccgccacgcagatggcagcctcattgacatggcagatatccgcatgaggaatggccacgttgattcccccggtcttaagacccgtggggaaggactgctcccgctccaggatggcctgtttatatgtatcctttacaatgcccttttcacagagataatctgtcatggcagacagaacctcccggtccgtcataggtttgtcaaattccagaatcaatgattcattaaacgcaatgccgctcatgattctttttcctccatactcttcattttctcttccatggctgctatggaaccgcggattccctcttcattttcattcagtatatcctctttcaggaaaatacccgaaccgattcccgcaaatgatgcccctgccgcaaagtactcctgtacatttgaggtgccaatgccccccacgaccatcagcggcattttccccagaggcgcctggatatctgacacatatctgctccccagcctgccggcagggaatatcttcacaatatccgccccgtccagaaaactctgtctgatttccgaaggtgaaaaagcccccggtacagacaccacgccgcgctcccggcacaggtccaatatgcgcttttcaaataccgtgggagacaacaaaaaggctgcacctgcctcaatggcctccacggcttcttcataagtaaggaccgtgccggctcccaccatgatttgtgctccaaattcctggctgattttccgtatggattccagggctcccggagtattcatggtaatttcaacggagcctaagcaggtccccaccaggttcttgacaaccgtgcgggtctgtgaataggtatagcctcttaagattactgtcactttcggaaatttttctatattcatcattctcgctcctttctgacaatatataaagcaagaatgatgccaactaattgactgattttgtatttttacataaaagattacggatctcttcccgtgtccggctggcgcggatggcagaaaccatggattcatcagaaataatctgatacagctgttcaaaatattttctggaatcctcctgaatggccagcacaaaaataacatccacggtgttgactccatcccataaaacgggtttgtctaattttgtaacagaaatgactggttttgtaaccaatccagggtcgccatgaggaatggcgatcccctggctgagccgggtggtcatcattccctcccgcttatagacgctgagaaggaattcctgccggaccaatccttcctctgccatatgtcccactgcctcatctataatctggtccttaaactccgcctctgtccttatatagatatggcccagagagataacctccgacagctggttttcttcgaacatggcactccgctttaatatgccgcgaagctgcctgatgccctccgggctgtaaacccggcttacagatataaacggataagtgcctgaatccggattgatggtgcccacaatagccagtatctcatactccttttccgtattggcaatgatgcgatcaatgctggaatcctcaatgtaccccctggtcactacaacggtcccggccaggttgctcttcaggcgttccgtcaaatgttcctttaattttacggcagctccctgtcctgtgatgcacaggcacaaaatcgcttttttcctggactcgctctgttccctggttccggtaagtttaatcttgtccagttcatccgcaatctcgttcagggattcatccgtccacatggtctttcgcactgcttccaccaccatcatggtgtctgtacggggcagcactctgacctgcatgcctgtctcctcccgaattttctgtcccacattcaggagtgagcccatgtcagccagcacgatgcagccttttccctggttgacgcgcctggccatatccactgtcttttccgccatctgagccggcgtatcccacaggttcatatccactccaacagcgtgttccgttcccatgatggcattggcaacctgggccattccgctggccaccgggccatgggataccaccagcaccccaattctcccctcctgggccatgtcctttttcctgaatttcctgaagtacatggccaggaatgccttttcctcttccggcagggtcagataatactttttctgtatttcatccacagcatagcaggcagcttcataatcctcgtaagactgctggcgaatattctccatgcctgggtacaccatacgcccgtgactgcgcatccgctccatggccatgttcagatgaatggccagaggaaacaccacctgttcctccagcccgggaagccgtttcctggccagatcacagatatccctcgtcatgcgcagaatgtcgtcccccacaatagaggcaatctcgtcctcccgtatacccgacttctggaattcatggatatggcgctggaaccttgactctatctcgtcggtaagctgtacttcgatgtcctgttccctaaggccgtccctcagcagctggtcatacttttcctccagggattcatatatgttaaagccctccaaaaaggtttccgttcctgattttcctgctgattccccggtatcatcgggaaacacataacagtcgtcagggcacagttcctttatatctttggtaatccggtcaggcacataacccttcctcaggttctccgtcaggctggcgaatgatacggtgatacgtccgtcctttctggcccgtccttccagaaacgctttggcacagcacacctgtatatccgatttaagctgtcccacattgcccgggcagtccccgcccaacagacaccagagcgcctgctgccttatttttatctgtttccccagacgtctggattcccactggaaaaaccgcaggataaactgcagcttctctcccgccggccggtcctttaaggagggaatttctatcaccatgggaatcctgcgcctgaaggtcagaagcagggagctctggggattttccgtggttgcggcaatgaccatcacatggctttcccgctgggtatccacttcccccagacgtctgaacctccccttatccatcagataaaaaaggatctcctggccctccgggggcagcctgtgcacctcatccaggaacagaattcccccattacacagctccactaccccctttttgttgtcagaagcgccggtgaatgcccccttgctgtatccgaagagctgggccagcagaagctggggattatccgcataatccgcacagttaaactcaaagtagggggcgtccttaccaaaattttcagtaccgcaggcatactcatgcatgagctccgccagaaagcttttccccacgccagaaggtccgtatataaggcagtgcagccctctgggcggatacagcacggcagcctgggcacgggtaatctgagtcttcatgctaccgtcaaaccctacaaaagcgctgaacgcattagccctttcatcctccgccccggattccgcaggttcttcatattccgcatattccgtatgttttgcatattccgtatgtttcgctaaatccggtgccagaccggctccctccttctcctggcagtcgccaaaaggagtccatatctccaacagttcctcccgcagcctgcctgcggcatattttcctatcctgtagccggcttcctccagcatcctggtaagcccgcggtccgacacgtccggatgttctgtcagaatccgcttcatgtcctcaaatataaccggcttcctccgcttcctggaatcaggtatatggtgctcccggcgtacagtggtcacatcctccctgaatacctgcagtcgggatgctatctcctcatctgtcaggggattcttactgtcctcgccttttatgatttgcaatatccgttcttccatgcgcgcattctcccatacaatcatacagcctgtttcaatgagtattatcataccatcttttgatatgatttaccacatggcaatccagccagcttcccctattgacagttgcttacaaggcgctgcgccagacattcttccagaaactccatacagtactgttccagatgcatcagcccttccttttctattggaaaatggcccgccccctttaacagcttcatatccttgctgcaattcagtctgtcatagaatattctgctgagactggcatctgtccatctgtcattttccgggtgcaccagaagcacgggacacctgctaaagcgctccggctccgggtggatatgaggatttaaaagcgtgtgcagaaatgccaccggcacctttgccccggaagaacgtctgtctctcatcagcacctcagccagttcctcatggtttacgattgccttcatattccccacccactttataggcacttttataaagcccagccatgcggatgcctttgatatgagcctgaggccgtgttctgccatccacccggaactcacaacgtttttccggaccaacggctctctctggtccagaaggcaggttgctatcactccctgaatctcaggcagtccggatgcagtctgatatgccaggattccccctgcgctgaggccgaacagaaaggtgggccttatctccctggcctgatagtacatgactatctcggccgcgcagtccacccaatcctggtataccacctttccgtaatactcggtcattccatagaggggaaggtccggacagattacctcgtacccctgcttcatgaagggtactgctatcaaagacagaagccttccgtttccccccacaccgtgaaacagtataacccgcgcttttggttcctttaccctgtagtggtctatatgtatgccaaacctgcctattcccacaaaatactcatccggccgccaaacgccggtcagccggttttcttccggcaggtattcctgtactttcttccagtatccgtcttttccgtaatacatgtgcgtccctccgctttgcgtcattactgtttttaaggcatgagccggataaaatgaacggtacggcaacgcaaaaagacatagcccgcattcttatgaaagatgcaggttatgccttgaatctgccggtgcataatcctatattgttataatcacaatcctggcttccgtcgctgtcagcgtcgtccatccttattccaagctcctcttgccaatcactaaaatagttgtctttacatagttatgttaaagttatattgaaatcattgtgtgaatgcagatacctctgtattatgcagcattatacgggatgggcggcgggttgtcaacggtatacacggaatcttagcggatttttaatatacggaaatttaacagattcttgcccccacccccaaacagaaccgttctgctccaaggctcaatcccttcccatcctgtcctcatataccttccggtaatcctccaccatgcgttcgtattccttccgttcaaactgccacaagggagagcatatccaggtgatattctcctccctctgcatatagggcttcgtatagtttcgcctcctgcgaatcagctcttcatcccaatgttccgacacccatttcctgtattcaggactgtcaaattgctcacatgctatgttgtccccatattcctcccagtcctggtccgaatatgcttccaggcacaggataccagactgcttctccatccggaaatcctggttttccaaattcagcacccccagactgttccagtatacagtatccggttccttcctgattttcgccattatgacaatgcagctcaaatcgcagtcatcctcgcacacaagtacaggcacattcaagtcctccaccgaatccaccatctcccagataaaacggttctcagccttccacaccagctcacctgtccatgcgggcagcagtccttccagggagccgaatacttccagcctgggacatgcccctgcacttaccgcctcattcagatatctgacaatgggtctaccgtcaatcatccagtagtattccccgtaatcatatatggtttgtaccagctccatgtgaatccggttcatgcattttcctcctggcttattccccgctccaaaatcccctgtcctaaaaccactttttcctcttaaagaaccatatttccactgccacaatcagcaggcagagaatgcagatcactgcgtaaccatagggaaagcccagctccggcatattgataaaattcatgccgtaccatcccgcgatcagggaaaggggcatgaatacagtggtcacaatggtgaggaatttcataatttcattctggcgtatgtctacctgggtctggtgcatttcgcgcagctgcatggaatactccttcatcatctgcaccgtggaataaaggcgccctgccttatcggaaaacaggccaaacagcaggctgtccctttcattccctctctcggccgcatcctgctgcagggtttcccccatgtcggagagctgttcatagtaaacgctcaatgcggacaaatccttcctggctgccaggattcttacgtcaaattcctctgactccctcttaagcagtccttcctccagacgtgtcaggctgtcctcgtactgctggagaaaaatcacatcctccttcagcagatattccatcacatcaaaaagctgcagggaaggagatgttacatctgtcatctggtaatcctgcatctcatccagaagcccccttacataaccgctgtcatccataaagatcagcttttccccggtaaggcaatagccgaatacctgcttttcctttgacgggtcctccttggaaggaatggcaaaagtgcctgccaccgctgctctaaacacatctgccttgcagaaccgtatatggttcagaccgctgccggaaaatattctccggtaaatatccgggcaggcggtccgaaactcttccatggtaaggatttcaaccggatgggactgcccggcggatacaccggcatccgggtcatccttgctgtgattattccaatggtatttcatatggtatcccccatgcttttttatgtcattgtaacacggaacagccaggacgtcaaaaggccgggcgcctgtgactggctgcccggccttttattataaatagtcttaaagtgactggttccctacagataatgaggggtctttggtgtcagcacctcactgccgtcctccgttatcagcaccatatcctcaatattaaatccattgactccccgtatataacagggcacctccatagccaggaccatgcctggttccaaaagccgttctgcggaagcattgatatacggctcctctgccgtggcaggacccaggctgatgctgtggccgcagtggcctcttctgtaacagggatactgctcttttacatattcataggcagtccggaacaattcacagacaggaagccccggccttgcggctgcaatcatccttctctgtccctcatacaggcggtccttcagccggaacagctccggggcggcatccttcataacccatgcccgggaagtatccgtggtataaaaatcaaactccgcattgaccccggcatcatatttgaccacatgggtgctctctatgattccgtcctccgggagcgtgagcctggctcccgaagggcctgtggaaaacatagaccatgagctgggtacacagaaacccgttgcaatgactgactgtctgaaacagtccgccatctctctttctctcacccccggccgcaccatccggctcacctggtaaaagccttcatccgcaatccggcacagggtgcggaacatctgtatctcatcctccgctttcacgcttctggccagtacaaacatggacgatatatccacaaattcgacttccggaaacgtctcctgaagctgccggaaatagggtacattcagatacgcaagctccactcccagcttcttatgggccaggtccatgtcccgtaccattttcttcagcatgtcaaaggaggattccatggattgtttatcgactgttttggcaacccctgtgatttcgtcccaggtctttactcccacccaggtatcataaggacgaaccacaaactccgaagcctcctctcccagtctttccttctgttccctcacccgcttttcaaacgtgagttcctcatagtccatggtggtaagctgggtggcagtcttgtcatccgaggacatgactgccagagcaaaaccaggctgtcttgaaaccgtgtgctggtgtcctgcaaaccctgtcacatagtggaaattttccggcgatgacacgatagcgccatccaggcccctttcccggagcattgacttaatccggcgctcctttggttttatgactaccttctcatatttcatttttctgcgctcctaactgcatgtgctgccccgcacatctgccagttcatggtccggcaaatttaccgtcccatcttcctgtccacggctgcctttaactgtcccaatgccctttcaatggtcgccctcggacacgcaatgttcatgcgcatgtagccgccgccctccggtccgaatccccgtccgtcgtttaaggccagtcctgcctcctgcaccatgaatgtctgaagctcatcccctgaaagccccagctcccggcagtccagccacagcagatacgtgctctccggcttaagaaaatgaatttccggtatatttttcttcaggtaatcccatgtatagtcaatattcccctccaggtaatccagaagctgctccagccattccccgccttcccggaatgcggtttccacagccaccagactaaaacaattattgcggtgtacatccatgccgaaccagaatttctcatatctatccttcatctcatgatttgggaagaacagggtagctgcctgaagtcctgccaggttaaatgtcttggtagccgaggtgcaggtgatggtaatatcagcaatttctccggaaacacctgccataacagtatggcgatgtccatacagcatcaggtcggaatgaatctcatcggaaataatgggtatctggtatcggacgcatatgtcccctaccttttccagctcctcccttgtccaggagcgccccaccgggttgtgcggattgcacatgattaaaaggccgggcctgcgctttgcggcttcctcaaaagcctcataatcaatttcataatacccgtcctgctccttaagtgaaacagtcagcggagtcctgccgctgttgacaacggaatcatggaattcagagtagaccggagtaaaatacatcacctcctggcccggctccgtaaactcgcgcacaatggtgcagatagccggaatgacgcccagggcaaacgctgccaggcttttgtcaaagtcataaccgttgcggtccttctgccaccggcacacagcttcatagtaggaagcaggccgcgtggtgtagccgaatatcccctgtttgtttctctcctccatggcgtccatgatgggttgggcagttttcaaatccatatctgcaatccacatgggaatcaggccctccctgccgaattttctggcgcattcatcatactttgcagaaaaattacggctgcggtccacgggttcatcaaaattatatttcaaatcgtttatcctcctttttgcggggaaaatactccgctaaaataaccgtagggagccccctcccgggccgcccataccggccggctgcaaggagggaattctcccctttcatcagagcctgttcctgcaggctccggtgctgtattgcgcagattcattaaacgcagtactaattttttagtcttgggtccagggcatccctcaggccgtcccccaccagattcagggataaggcaatggttgcaatggtcagacccggaaacagtacgccccatacagagtagcgcatatactcctttgcgtcggaaagcatagatcccagctccggagccggcggctgctggcccaggccaagatagctgagggctgccgtattcagaatctgcgccgccacagccatggtggcctgcactataattgttcccactgcattgggtaatatgtgtcttactatgatgaatacaggggaacagccgtaagccttggcagcctctatgtactccatgtccacaatattaaataccgcggaccggaccaccctggtaaagccgggtacctgggaaataatgagcgccagaatcaggttgcgtataccggctcccagggacgccgctatggcaatagccagaagcagtgttggaatccccataaatacgtccagtatgcgcatcagcaccgtatccacctttcccccgtaataagccacgatggaccccagcagacaggcaatcagacaggccactgccgtggatacaatacccacggtcagggacactctggccccgaagagcacacgggcaaaaatgtcgcggccataatcgtctgttccaaacaaatggtgcagggagggccccagaaatctggcgtcataattctgggtaatggcatccgcctcatagtcgcagataaccgatgcaaaggccgccagaaggaccacggttacgatgatgacaaagccaaccatagccagcttgctccttcggaagcgtttccatatctcagccgcacggctctgtttcttcctgtctttcttaactgtatcaggttgcaggttgtcgtttggcacgtctaacacctcctacatatttggctttgattcttgggtcaatgtatgcgtataaaatgtccacaatcagtataatcaccacattgagggctgccagaaacaggatacaggcagttgtctggggaatgtccttggagcggatggacgtgatggtcagggagcccagtcccggtattccgaaaatggattccaccagtacggtgcctcccaacaggtagccgaattcatttccaatgaccgtgataaccggcagcagcgcatttctcagtgcatgcttgtaaataacagtatgttcagacgctccctttgcccgtcctgtccttacatagtcctggcggatggtctccagcatgttggaacgggtcagcctgagtatgctggctgccgtggccatggccagggtcaccacaggcatgataaaatgcttcatggtgaccactcctgtaaaggtggatggcagaaggcccagcttcagcgaaaacagcataacaaacatcattgccagccagaactggggcactgcggcaaaaaacatggccaatatggtactgacaaaatccaggcccgaatattgccgcaccgccgatatgacgccgatgggaacacctatcatcactgccaggcagatagaaagcacacctatgcggaatgtcacgccaaaacgggaaaagatttcatcaaatacaggctgacgggttctgtaggaggttccgaagtccccgtgaagggcatcctccagatagtgcacatacctcaccacaaacgggtcgttcatccccaattcttcattcagcttatcaatctgttcttttgttgccgatgttcccaggatggcagaggcagggtcacccggtgtaaatgacatgataccatatacgatgaacgacacgcccagcaataccggaatcatcagcagcaaccttttcaaaacatatttaatcatagatatgcttcctttcagatatcggtagttcagacatccggcttaaaacgtgccggccttaatcccagtgcatatcccgaagggttgagaaaccggaatcataggatctgtctaccgtgactcccttattgtatgcgcatgtaaccacacggtcataaatggggattatgattgtatcttcatacagcttcttctctataacagagtaaatgtcctttctctgttccgggtcctgacatacggaaccgtcctgaaaagccttgtcaacatccgcatcattaagcctggagaaattatatccgccgatagcgctggacatgaacaccgtactccagaaatccacatcagggtccatagtctgtacgatggtggacatggcaaaattaccggacttcatatcggaaacccatgtattggcctccagctgttccacggaaatattcacgccaatctgttttaactcttcctggtagacaacgccaattttcttatagttctcatagccgaccacgaaggggatttcctctccattatagtcagtctttgccagatactctttcgccttatccagattaaactcaggtgttgtgtacttgccggaatacccagcggtcctctcatcccataacaggctggataccttggcaacgccgtccatacccacttccacaatatgctcccggttggtggcataagccagggccatacggaaattcgggtcgcttaagaagggcgcttccaggttcatgactatgtatccgctacccatggtaggattcaaatccagcaccagatcctggctgtccttaagctcctgcaccgcgattggcgggatggtgtacgtcatgtcaatctcacctgtctgaagagctgtaagcgctgtctccggattagtcagcaccacatagttggcctctctgatctgaggcagggcatcatggtaatcatcaaagcgttccaggacaacctgggagccggaatcccactgtttaaatttatatggtcctgtaccgacaggcatctgcctgatgttgtcgccggcctcatttaccgccttctcattcatgatacagaccgtggaggccactgctgtcaggaacggtacatatggctggtccagaacgatttttaccgtcaggtcatccacggcttccgccttgacgatattctttgtgaaattagacatctcactggattccttggcgcgcatcatggaaaataccacgtcgcccgcagtcagggtctccccattgtggaacttaacgccttccttcaggttgaaggtatactctgtgccgtcctcgctgatgctgtaatccttgcacaatacattttcatatttgccgtcataatagcgcagcagacagtcgaatatattgctgtacaccaccttatccaggtccatgccgctgttatatgggtcaaagcccgcaaagtcggaatagacagcaatcttgatggtatcctttcctccttccgggtttcctgcatccgccgccttctcggttcctgcaccagcgcctccccctgagctgccccctgaacttcctccgcacccagccagggcaccggctgccattgcgcacactaaaagcatgctgattaatttcttcttcatctgtttacctcccttaatttagttaaataatacacatgcaacttggtggttctctgaaacatttttcaaaggaatatcatggcccatacatttttccgttgcccttggacatctcggcgcaaaacggcagcccggagccgggtcaatgggactcacgatttctccctttatgctctgtcttttcctgttccttccctgaagcctgggtaccggtatggaatccaaaagcgcctgggtataaggatggagcggattcttaaatagttccctgctggaagccttttcaatgcactggcccagatacatgaccatgatttcattggaaatgtgctttaccacagacaggttatgggtgatgaacatatatgtaaggcctctctgctcctgcaaatccattaacaggttcagtatctgtgcctggatggaaacatccagagccgataccggctcatcgcagacaatgaactttggatttaaggacagggccctggcaatcccaatgcgctggcggcgtccgccgtccagttcgtgtggatacgcattgtacagacgggaggccaggcccaccgtgtccatcagttcagccacccgcttttccacctcagatttcttccggcagatcttgttcaccatcataggctgccctatggtttcgctgactgtcatacgcggattcagggacgcatacgggtcctggaaaataatctgcatatccgtgcgcagattctgcatacccttccttccgcattttaagatgtccttgccgtcaaagaaaatctgccctgaattaggctctgacagcctcagtatggttctgcccagcgtggacttgccgcacccggattcccctaccactcccagggtctgtccctgcatgatctgcatgttcacatcgtccactgcatggagttcaccggaaggagtatggaaatacttttttaaagatttcgtctcaattaatatttttttatcagacatgccaatttctccttataccttgtcttggtgccttaaaaatatagcggttattatatttgcgccgtagcctgctttgtccccagaggtcccgggcagagcccggcggattcctcagtacagactgcgggagcgggttatgagacaccttccggtccatcctggtacaggtggcaccgaatcatatgggttccctccacacattccggcggctgggcattcttacatatatccatacatttaggacagcggggatggaacttgcacccagggggtaaatccgtggggtccggcatcagtccgtcaataggattgagcctcctgctttccacctccaaatccggtatggagccaaacagtccttccgtataaggatgtctgttctttccttcatatatatcttccgccgtgccgtactcaatgatttctccggcgtacatgattgccaccttgtcgcatatctcagccacaattcccaggtcatgggtaatcaggatgatggacgtgttgattttctccttcagctcctgcatcatatccagaatctgcgcctgaatggtcacatccagggccgtggtaggctcatcggccagcaaaagctcaggcttgcaggccagggccattgctatgaccacacgctgcttcatacccccggaaaactgatgggggtaatcctttttacggctctccgcaatccccaccagcttaagcatttcctcaatccgctcctgcttttcctcaggcgtcagatccatgtgaagctccagggcctcaccaatctggttccccactgtaaggaccggattcaagctggtcatggggtcctgaaaaatcatggatatcttttctcccctgaccttccgcatgtcctcctcggctgcttttaccaaatcctccccgttaaacatgatttctccgccggtaatcctccccgatacctttggcagaaggcgcatgagggaaagggcaagggtggtcttaccggcgccggtctctcccaccagaccaatggtctcccccttgttcagggtgagggatacgtgattgactgccttgacaatgtcctcgtccgtcgtatactccacgctcagatccttaatttccaacagcttctcttccatattccagctccattccgtttttatcttcttaaagctttcatttctgttattgtcttcatttctgttatcatctgcattcctgatatgatttaatgaagataatccttaagcatgttcatggactgctcattgattctgtcccacatctcatacaccggaatcttccagtcacactgccgtaccttctccgccagctgagggcttacacagatgaccgatgccttttgggcaatcttcttccacccgctcctcttatcctcgtagtaaacttccacatccagctcaggacacatcctgtgaaccaggttcacaaagccgtccgccgactcttcctttttgcagataaccgctgccacggagcctgactccagggattgcagcgcctccatcacatccggggcaacctccactgtcataccgtaaataataggctggtagcttctggctatgctcctcacctgggcatactggaaatatgtggtgatgattgcgtccaggtgctcaatctggtcccggtgttcctccagataatcccgcagctggtccaaatggacctcctcaacctgtacatccgcttctctggcaatctgcatggcgaaccggtggcctatattcttttcctcatacacaaaaataacgcttttcttcttgctctcttcaatctccttcaggaccttgtccacaatgctccgtacctcgtccacagaaagctgataataaatggcgtttttaatggatgtgaccagttcctcctccagcttttttttgtccatggattctgtctgcacaatggtcccaatatggggcctggtaaccaccagctcctgctgctccagccgcttgtatgcattgcgcaccgtattaatgctgattcccagctcatccgccagtacgcggatgggaggaagcttttctgtccaccgcacctctccggtaaaaatgctccatctgatattcctgaccagctggtccgtgtatgggattttagagtccttattgattttccacacttcggcgtaatgaatcatagatattccaattgtcctttctttctgttgggcaacatttataatgttttattgtttgtttccattgttaccattgtttctatcatagtgtcaatataacacactttgtatgttttgtaaatatgtacatattttaaaatatattaatcaatttttgtgcacattctatatttattagagtttgtagttttgtttgattggtattaatatggtactgcaattataattttgaaataaaggctttaacagaattttttcatatatcctgctcctatcttcttaagacagctccaaccagtgagcatatatatacagaagggtatctaaagacatatgggttctcttgcccttaatggacagattcatcattatgcgatataataatgccgctaagcagcaacaggctgccgcagcttcttcatatatcaatacacagcaggtggataaatggtttatacaattacggaaatgacagaaaaacattattatggcaaagcatatgtccagtatgccgcctggtttgaaacatacaggggattaatgccggatgaatttcttgataacagaaaacttgagtcttgttatgagtccacgctgaagcatcctcaggacacctatgtggcccttgtggacgaaacagaggcgggcttcatatggtattcaccggatgcaagggaatatacacgaaaaacaggcatgtctgaaataaatgccctttatgtattaaaaaagtatcaaggccacggcataggcagagctcttatggaaaaatccctgagtatgatgccccataaagaagccgtattatatgtcctccggggcaataaccccgcaattggtttttatgagcatatggggtttatgcttaccggtaatacatttacgcaggataccggatttgggaatattgttgaacttgagatgatgcggaccggcagataaaccggaccataagcctgtgcctgcggttttggcagaacaggtaaaatacaaacaaacaccgggaaataacggctccaagtccgtacctaccggtgtttgttctcataatttacttcttatgcaggatttttataccctgcttttctattttatttcattggctttaattgctttctgtatccccatcctctggcaccataagctttcccttgaggctggaagccattttaagggctggaaattttgcgtgataaagagctatggcctcatccgcgtctttccggttcatcgtaaattcgtattcctttccatccgccatcacgcacaccagctccgtactggtgccgcgcccaaccttctttacctggaaccgaacctttttaagttcctggttcaccagaatcactggcttacccacgattccatatgttagatcctcaccaatccagaatgtgccgcttatcttccgggcattccggaaatcttcatccagcctttccctgtttatggttttatggctgtccagaaacgtccgtactgctgcgacatgatgttttttcagcatggaggacaggataaatagcccaaggagcgcgataacggccccgaggccggtggtgcccatggcactggagggtgtctggttatccagcatgcctgcccaaaaataataactctccgtttccgtctccaggtcaaaactccggaccgccctgtcatagtattttttgccatcacccttcagtttcttcagggtgccttccacatgcaacccctgaggcggatcggaacgcacaccctttaaataatcccaggtttcgtccataatccggtccatttccgcctccattttaccggaaatacgcacaggaacagctcccgcctcctcatccagcaccagataatatatactgctcttggtgcgcaccccgctgcgggtacggtagctttccatgaaggcatccagcacatagtttatatcaaagcttacatattcatccccggcctgctctgtcccgtatacttcacggagcggaactgcaccccgaaaatactttatcagatagctgcctaccagtaccatcaggccaatcccaaaggcagttaccaacagacctacaggcacattgacgcgcaccatggcctttttgaattctgtttccaccgttctcctgtttgtattatcgcttcccataccatatatccccctcattgttatcccggcagtaccgatcctccggcagtgtcaattccgggacaccggctctccaattcctcctgaagcgccctggcagcttcccgtgatgtctcggcccatgcggtttttttatcctcagtcatcagatggatggtcaggtaatgagcctgctttctggtttttccgactttcacatagtatgtattatccttgatgtacgcttgtgtaagccggctgagtttcaatacgcatggcatgttgccgccgtaaagacagatataatccctggtcagaattcccctcttctgtccggtggtaaaagatttcagctttccaaggtgattcaggatcaggctgtccgaacccatggcctgtttgtcaaattcccgtatctcctgttcctctaatccgccggccttggcagcaacgcgaatccaatcatccacagtctttctaatatctttggttataaaaaaaacagctactccgaataccgccaccagcaaaagaaagaaaaccgaaatcccgattcccactcccagcatattttcctctttatcccggatgatttccagggttctgtttatggaccagaccaggccggctatgctgcccgccagaaaggctcccataaaaaacaggcccaggcccgcattgactcccttcatggcctttttatgagccttaaacacagatccttccggataatgcttttgcttgtactcctcgttcatactctctaagtatgtttctttgttctgggctgtcatatactgtttcctcctcttttgtaacaatggcatttccgtgatagaatgcagaaatgtttcagtcattctttccagttttattatacgtatgaatcgtaaaaaaacaattggtacagcataagccgtactatttcggcacaaaaagcaagacggtatcattcagccatctcgcaaatcaatttcctgaatgaaccgtcctgattcttccctgtaactgtaatgtccttgatattttccaataatcccccgtatgctctccattccaaacccatgatacctcttatcctgttttctgctttcaagattgggattgttcttcagcacagaccctgatatggtattttccatgaaaatctcggttgttccgtcctcttccctcaccaccagctccagttcacgttctgtctcaaccgccatgcaggcttcgattccattagaaagcagattatacaaaagggtgcccatgtccatgctgtcaatcctgtccggccttcccataaccacataccggaaccggatttccttttccctgcactcctgaaccgctttaatcagggctgcatttaatccctcattgcctgtatcctggggcagttcaggatagtttcccaggtctgctcccatgcgttcaatatattcggccgcctctgcgtaccgttccttcgccaccaggcggtacaacacattaaggcgccccttcatatcatggcgcaggcggtttacctcccggcccattctgtataaatcccgaatctgttcctcctgctggcacttggtttctcttctgaattccgcctcgcgttcttccctccggtaccgctccagcctgtggtaaaagcctcctataaaaacaatcactccaaaaattcccattaacatacaaagagccagaacatatctccctctctggtccagtctgccttcctccataagaaacattcccataatcagaataaacatgcagaaaaatgttcctgccagcattccatcctcagcctggaccggtccctttttccgtccgtacagtgccagagctgcccggcccatggaaaatttaagagcacatcctgccagtaagggaaataccaccgcgtcccggtccatgatcatcagtgtattaagacttctgcctgtaataatccccaatgtcccatagatcatataagaactgctgatggctatcagaatccacaaaagactgtgaacaatgaccttttgcgccttcccattcagcgcaatcaagccatatgctgtcaataccacgccatagctgattcccaggaatccttcaaagacaatataacggttgagcaggaccatgattccataataggcaaggcatccgcctgtaaacagcatgattcgggcagcaccggaatatttcttatcaaaaccatggtccatatattccattgccacgagggtggataatacatcaatcacataagcggctgccgtgctttctcccatactccatcatcatctcccttacgcctttttttctgtcccttcccataggaataactgccccggttttaagaacagcatcctgtttttctatctgggaaatatacgcctgattcaccagataattccggtgaatacgtaaaaaaccataatccctcagttcctccgccacaggctttaagctcccgtaaacagagtactccgctccgccggacattttgtaggtcagtgtatggccattacactctatgtacatgatatcccgcagaagcacctcgcctgcgccaaagcccccctgaattttataactgattttcctgcgggccgtcacctgaaaatacttctgcagtgcccggcccatatcccgttttaaaagtcccttcctcacaaaccacaggggcatatattcgtgggcatcaaacacccagctctcatgactggaaacaaatataagccgggtctccggacagctaatgcccagctgctctgccagccagaacccatccctctccggcatctcaatatccagaaacaccaggtcaaagggctgctgctgccctgcttcatataacctgcatccatcggtaaaaaggcttacctgcatgtccacggttcccggcatactgccgatatactcttttatttcctctttaatctgctccaggtataccctgtcatcatcgcagacagccacacgaagtgtttccatgggattgtccccctttttattcttatgattgtgggcaggtggtgcttgtggttgggttgggttgggtttggttgagttgggcttggttgagttgagcttggtttgggtgagtttcgcagcattggggtaaattgtattgagtaagttgcattgagtaagttgcgatgggtaagttgcattgagtaagttgcatcgggtaagttgcattgagtaagttgcaatgggataagtcaagtcgagttagacccatataatttaatccggtttaatcccatgtcttccatacttcgggctgataaccaattgtagccttcttaccatttctgacaatgggcgacttcaggactttctggttttccaggactttctcatcccggtcttcagcagcaatgtacttgattaatgccagtgcgtccttatctttgcaatcatcattcaacataacatccagaccgcccacggcctgcttcacacttgtgtattcccccttactcatgcctttttcttttaagtcgattaattggtatttgatgttccgctctttgaagtagcgttcggctttctttgtgtcaaagcatttttttgttccgaagatttgtatattcattgggtagtcctccattccatactataacaatgcttccaggccgggtacctggaaatttgcggtatggtttattgtctcgccagccgcggcctgccgatgaaatttctctgagccttgcaaaatctaaaaatataatgtataataagcatataaaagagcaaccgcccacaaggtggaagcctacgagtcaatttacgtcctacatgaggacgcgcctatcctgttggctgacagggtaggcatttttttatttcttgttatgcctgtctatgtaggtcagtaatacgataaggaacgagccgcccaaaaagagcagacttaaaatttcatatgttcccataacacaccacctcccctctcttgtaagatgggaggctgccaccctgtacacggtgctcatgaaagcattatagcaggaaatttccagataatcaaccggcggttcccaggctggttctacaatggctctacacgttataagtaaatgctccataatccgtgggctgacttgcgactgattttatgtgatgataatctcatcaaatctacttagaaaaccccataaactttgactggagttttctaagtttcaaaggagatttcaagtatgaatgaagtaatgcaggttcgtgcggccagttggaccgcaatgatcaaacaacgcagcgatagcggtctgaccatcaaagaatggtgtgccgccaacggaatccaggagtcagtctattattaccggctaaaccggttgagaaaaatggcattgaatgcttgtgaaacaccggatcctacaaaggatcatgatccttctggcacatttgcgcagatatcagttgcttctactgtacagacttcaaatgcagcaatccgcattcgccgtggtgatactgttatggaagtgagcagagatgcaccggaccacatcctctcttttttgaaagaggtgatgttccgtgctctctgagctcaccggttttcaggccatctatatctactgtggaaaatgtgatcttcgcaaagggattgatggtttagcaacgttagtaaaggaacagttccatctggatccttttcaaaaggatgtcctgtttcttttctgtggatgccgcaccgaccggttcaaaggcctggtctgggaaggcgatgggttctgcctgctttataagcggatcgaagccggacgcctccgatggccgagaagtcaggaagaagctgcagggatctcgcctgaagaacttcaccttctgttggccggaatgacgatactggaacgttcctctattcaggaatgtaactgcacagaaatcggctgaccggctatgcagaaccgactttttctgctatactatccctcagaaaacggaagggagggatactgcgatggcatttttgcttaaagaaaaagaacttgcgaaccttgacaaacaaacactgatcaaaatgctcgtggcagccaccgagtccaaccagaaactctttgaggctaccgaacagctccagaaaagcgtaaaccttctgacagaagaagttgtaaaccttcgccagcaccggtttggccgttcctcagaaaaaggactgaccatcggggaagacggatgcagccagctttgcttcgctttcaatgaggcagagatgaccatagatctggatccggcattccctgaaccggaattggaggatatcttcccgaaaccatacaaacgtggaaaaaagaaaacaggaaaacgtcaggaagagatcaaagatgttccggtgacagtggttatccataccctgtcggaagaagaactgcttaccgcatttccggatggccggtacaaaaagcttccggacgaagtatataaacgtctggaattccatccggcaagcttcgaagtgattgaacatcacgtggaggtatatgtaagtgcggatggcggaaactttgcgcgcgcagagcgtccagctgatctgttccggaacagtctggctactgcgtctctagttgctggtatttataacctgaagtatgtaaatgcgcagccaatcgaacgcctttccaaagagtttgaacgcagcgatgtatttctcccgacacagaccctgtgccgctgggcgattatgggagcggaacggtacctgagccgtgtatacacccgaatgaaacaaaaacttccggagtatcatgtgatgcatgcggatgaaaccgtggtagaggtacgcaaggatggacgtcctgcaggagctgagagccggatgtgggtgtaccgttccggtgaactggagtcaaacccggtcatcctttacgaatttcagaagacccggaaaaaggaacatgcccgtgaattcctgaaagacttcagcgggatctgtgtaacggatggttatcaggtataccattccattgcggatgaacgagaggacctgacaatctccggatgctggtcgcacgcgcgccgtgggtttgccgatgtagtaaaagccgccgaaaagaaggatctgaacatccgggagtcagttgcctataaaagccttcagcttatacagactatgagccgatgtgaagagaagtttgccaaactggaaccagccgaacgtctggaagcacgtatccaccatatactgccactggcagatgccttttttgcgtatcttaaatcaaaagaaggcagtgttgcccaaaaatctgccactggaaaagcgatcagctattgtctgaaccaggaagcattcctgcgtgtctttctgacggatggttatgtaccgatgacaaataatgccgcagaacggagtatccgaccatttacagtcggaagaaacaactggttccagatcgatacagtcagcggagcaaaagcaagtgcgatcgcctacagtattgccgagacggcgaaggcaaatcagttgaaaccctatgaatatttccgttaccttttggaagagcttccaaaacatggagaattagaagagctgtcctatgtcgaagagctgctcccgtggtccgagacattgccgaaatgctgctaccagaaaaaggaaactgaaaactgatcaagtttatttatatctgccgtccataaagggcggcattatttttagtcaggtactggctatggagcatttaccgttataatgtcacagcaatgtcacggaggcataaaaaagcccgggaacacgcataaatacgtggttcccggaacttaggacgttattcgaattcggcaagttcatgggtgtttctaaacacttttgtttagttttttgtgcttttaatgcctactttttacttcatttacacatattattttgacttgctgattttttgttgccaatatgttgccattccatgtaacggaatatttaatttttatatgtataattatcttctaccattcgacttttgagatacttaatagggttactttgtctcctgattctttttgcagtacatattatttcaattaattgttttgaatcagatactaatattccataatttttagcaaaatccaatgcccctgattgatgtccacagtttgaaatatgccaacctattatatcaccgttttctattttaaaccaatctggaagtatctcccctactctataagagcgattgtaaacattattcatagtagtaataaactctttcatatgtcctacattatcttttgaactatattgtttacattggccgattattctaattggcccttttataccaaaaagaaaatgggagttaattgaaaacggaattcttgctataaaatcaattcctccctcatttcctttcggggtaagataaattttatcagcacctaaaagttcacatatcacacataacagtaactcatattctctgtcattcaatgaatctaaatatttatataaatcaggtcttatcttataattttgcctttgtacttttgatattaatgtgttgcctatccaacgaacttttttatcatactcgtttgtgattgaaaataatggaacaattccattatttatatctttttcatgttcccttttatattgattccataaacgatttaatctgctagccgcaatagcctctgctgtacccatatcttttgttaattctttgagtatagcatctttgattatctcttcaaaatagtattctttatcctcatatttcaagcggtatattctatcaaatatcttttgattttcatttactgacatgcttccaatatctcacctattttcccacttaatttcgtcaacaattcgggaagttcttctttttgatttaccaccaatttgaatggaatatcatctaacgccttgatacaagactttattttttctaatgtttctgtagatggatcttggctttcaatatatttacgcatattagcagagttctgcgctttttctaagtctccatctgatctaaacatttcaaaatctgttatagattctctaagtaaaaatgatattatgcgtacatcattacttcttttaataaatctattatcccaatttcctttcacttctgtaccatctagcgtattttcttcatttctagggtagagccacgataaaaactcattaaatttaagagtatcctcaaatttatatttgctatcattccaattcaaccaatctttgaaaacaggattgcttctactaaatatttcttgcaaatacggatatactttttcatcaatctcctgtgtgtaatcagattcatccgccgcttgcataaaagcataatatcctctaacccattgaccggcaccatatgctgtaagaccaaatttttttccaacatcagtaagactcaaattatcttcttccattaattgtactagcaatctagccttattatatgctggccattcctgaatacctatgatatgtctcaatccttgaaaaacccatgatggctgctcctctgtgcctgtatatactaaacattttatctcttttaatgagtctatcacctcttcgctaatagtatcattattcttctcatacatttccattattactttagctgcacatattcttcgatttccttcaagtactacatatttatcttccgaaaatcgttttacaataactctatcaatggaaagaaagccatttaactgaatgttatctactagtttataaattgaaaactcttcttcaagttttctccttgtaattttttgaattccatcatcagcaatatgctcatctgaaacatcattccatttaagcgaagtaaagcgaggattattaggatctaaataaattttatctaatgctataaccatatcaactaattctttatttaatgttccattttccactttcgattacctccattcattgtatagttttttatttattataccttctttccactatccctcaaagtaaatatcccatcataatcacaatccaacgcctccgcaatatccctcaattctttctccgaaaaattatcacgtgacagcttattactcaaattatttccattcgttccaatcttttctgccaattcctttattgtcatatctctttccaagagtattgttctgatttttttagccattcccattgtgtaatcctccgttcatatacctcaaattatacactgaaacatatgaatttacaatgaaaaatgatatttgctacattatagtgacgaatcttattgacattacccacttaaagatgtattgtcatacttataagtgtttaatgttatatttaagtgaatttataggaggtcacaatatggaacaagatttaaacaagtacatagtcaatgagttctgcaagctgcaaaccgatacagagcaaagaagtttcattgaaaactttcgttttctgatgatgtctaacgactttgattttgaaaattactattcaaacaaggcacttaggagaactgatttttattctattgcagatatgttatatcagctcaacaatttttggatgctatccaccttcattcatcaaaacagacactttctttttaacgaggtcaacgacattacaagcggatgcggactgccggatttttctgttccttgtaagctcggacaggataccatgctttcaagagtatttaaagtaataaataaccattctctaaatgagaatatcctttctgaaaattcttctgattaccaaatcaacacccataaattaagaatctattccactaccctccgaagcaatcagcctgtaccacaaataattatacaaggcaaatgggtagaaaagtggggcttctccattggctgtagtgtccgtattgaatgttatcaaaacaaacttgtaatcctgttagacgaatgatactaacgaatccattaatctctggaaaacaaaaatctggaagcagctttacgctctcccagatttttttctctatttaactgtcatatctgttaaattctctgattaacgcttctgccgttgcctgattgtatcctaagtccagatactgctgcaataacaaatcgtgagagcttttaaccatatcatcttcaatatcgcaatactgctgcatttcccccgacagtgccatagacacgtattctatcgaattttcatctaacagcttccatatcttactttgagaatgttccgtcagccggagccgggactccacttcctcacagtttaaccttaacatattaccgtctttataatatacttccacataaccgttgtccatattgtattcacattttaagatattatctttcattcctgtgcttctccttttcctgtcttggtaaatctaagaccgccagatttttaacctttgcttcccgttcatattgccttaacttatctctgatactttccggtttcggcggctttaatccgttatcctctttccatgcttccaactctttttgatactgttgcactgctttttcagactgactatacacctttataaaagactgtatatttttataaccatatcgtgtaactgccttgaccagataggatttcagatcggatactctattctgtgctgtctcaatctgcctttctacttccttccgctccttagatttgaatattccctttaaattatcagactgctgtaacagatccggcagctctttttcttcaatctgtctgatgacccgtacctgtttatccaaatcttgtttaatcttttgcattttatgatactctgttatatcaacagaaatcttcggcttaggcggcagcttttgtttagaaaccagattcattaatatcactctggcccgcactataatctgtaaaaacagtccgggacttcttccattcacagctatggaccgtcctacctttttcgctatttctgtattttttattttttgaatatctgtttccggtacgccttccaccagagctatatccaccgcttgattccattcttttctagcctgattgtctgacataatttcagccgctttgggattgttcttaccaatctttttcgttggaagatatacgccggacttatcaaaaacctgtaactgttctaatggattctttatgtaacaattcatcagttctgtaagtcttttcttctcgttttctaaaaatacatcgctcttaaataatgatattttattagaaaacgatctcttctcataaacctccccttttgcaattacagtacagccatttctcatattcccttgttcatccaacagttctttctttgttcttacatgcttcccttgttcatcataaaacatatttctgctagcgatttttatatccggttcctccagcattgtcctctcactgaaaatcaaatgaatatgataattcgttttctttttattgtgatgaagagccgccacacactcaactccgtgtgcttctttgaagctgtcagtaaaggtttttaatacccaatccggctcaaagtttacataggattcaggtaatgcaataattaattctctggcttctatgcacgttccttctgtgccgcttttttgaaattcccgctgactttcctttgcaagcacattccaaaacttttgcggcgccgtatcataaaccgcatacaaattttcctgtctggcgtgactggatatgtaatcaatccttccctttacattggttatcttttgtatctgcacaaaagaatgtcttggcatataccgatccctttcttctagcaaataaaaatatatgatacacatttttatgatgtccgttaccagactatatgggcagctctgctgcctgaagctcgatgcaatcgcgaaatccccgttgcataaaccgtaggtttgtgcaatgggtgtatttcgctctcaagcgccgagggcttaggagagactaccttttatatagcgctgctctgtttttgcttttttaatttgggcgttcccgcccactttatctgcccgtttccgggcagttttttcaattacagagagaatacagtccacagtgctttcttcccatccggcaagccatataaagatctgttcctcccctttcgtcaattcaatatctccaataactttattcattttttaaattcgctttccttcactttcgtagaaataatcatttacgttccggcttctatacgctggctgttttatcattttacttcgccctccaattcatattttctgttgacggttattacaggagcgtgtcacgctcccgtctaagatactcaaggaagtattaccagcgaaagctatccggcacaccacgcttatccagatactcttttctggccttttctttttcttcctccgttggtgcggtcttatattttgaatataataaccgcatagttatggaatccatcttatccatcaagtccttttttatttctggctggacttcctctatgtccagcaaatgatattttatcagggcaataaataactcttccggtatctgcacacttttcattttgagatcccttctgcgtgtcggtggtgtcgatagtgacgatattttctataccactcccatatgtaaaataccgtcacaatcgtcacatatcgtcacgcctttgtttaaatcagtgataactttatttttctgccgctatgttcccgaatactctcgtacttgatgttgtaatctatcagtaaccgttccaggctgacattcagcttacgtgtaaaaacattcggctgcatatctatctctggtaagagctgtaatagctccgatgcggaaccgctccattccggcgcttcatttgtcactactgtagcaactgattcaagcacagaatctacaggctccttccatagttctgtttctgatttagtaagttcccatacgcactattcccgattaaaattaagaaataacctctgatcttgctgatcgcgtccggcaacttccaataccgctttattctctgtccgtttttccttctgcatgataaaggctccatcggcagcgcccagcaaaccgttggttcccgaaatcatatcaaagctgtcagaagattccatttttcttgtatgatgaacaaccagcagacagataccatactgatcgctgaaccttttcagcttggttacgatttcataatcatttccatagcttagcttgtcgccactcgcttcacgcaccttttgaagcgtatctataataataagtctggcgttttcatgctcctttacgaacttatgtagctgttcctctagtccctcatgtaaggtcttggattgtgtcgcgaagtgaagattgctgctcccctccatgccaaacattttagataatcgtctttgtaatctggcataatcatcttccaatgccagatataaaacagtgccttttgtcacaggaaatccccataaagggattcccatgctgacatgataaccgagctgcgccatgaagaacgatttacctacctttggcgctccgacaaagagatacgttccattaaaaatcaatccctcaacaatcggaacccgtggcggataagctgtgtcgtacaattcttccatagaaattgttttcagaacattttctccggctgtcaccacatttacggtcacgctatttgtggcttgttgattgatttgcatttttgaatctgttataatttcattgttgatattaggaagcggctgttccacatctacgtcaatagatgaatctggaacggctgcttttttagttgctgtcatcattgttccccctttaatccatttaaggtttctgccactatttgtagcgtataaaaaagttcttcgctgacctcgcaacattgttctaatctctttagttcctcatatatttctgccatctggtttctaagagccttatacaccctcggattcccctgtaccacgacttcccggttcagcagtttccgaataatgtaatcttgtttcgtaagtcctgaaagtctcacacaatcatcaagcaacttcccttcttcctccgacacccgaaaagctactgttttacttctccatctcccctgatagtctaaagtcttattcattcttttccccttcctttcccattctttcaatatccaatctgtctgccatctccgtctgcttggttggaaacaagtgtgcatatcggtaagtaatatctatactttcatgccctaccctctgtgcgattgcaagtgctgaaaatcccatttctattaaaagtgagatatgagaatgacgaagatcgtgtaccctgatccgtttaactccgccctgtttggaacctctgtccatctcatgatgaagataagactttgttattggaaacagtctttcgttttctccgatactgtaaagcatatcaatatattcctgtatctcttcacagaggaactttgacatttttatagtacggttactctttggtgttttgggggaagtaatgacatctctcccttttagccgctgatatgatttgttaatagttaaggtacattttccaaaatcaaaatctttaggtgtcagtgccaaaagctcgcccatacggataccacaccaatatagtatttcaaacgcataataagattgtggtttgtccatcatggcatctgcaaatttcagatattcttcttttgtccagaacaacatttccttatgttcctctgaacccattgctccggccttctgcgccggatttgagggtaagtggtagaatcttactgcgtgattaaaaatagcgcttaattggctatgtatcgtttttaaataagtagcggaatacggctgaccagattcatctttataagataacaactcattctgccacgcaataatatcttttggttcaatctcatccatcttacgtgattcaaaataaggaagtatctttgtccgtatcacatggctttttgattcccatgtattttcctttacccgttttcgtttatccgtttcatagatttcaaagaaacttccaaaggtcatatcaagtttagcttcctgtttcagcatggtttcccgttcccaattcagagcttcccgtttagtcggaaaacctctcttttgtgtctgttttcgttcccccttccaatcggtaaagcggaatacggcgcgccattttcctgtgtcaccatctttataaactgccatcttatggctcctttctgcggcactttaaacgtgccgctcgttgtaacatatttttttatggaaatactgggcatttacccggcctgctactgtaagataaccctgttgctttaattcttcattgagctgtttgacgactctgtacgcataggattttgatactcctaattcttctgcaacttcctgaacactgatgaaagttttactttgcaagtttgcttctcctttcctaaacatatttatttaagtgctgtaacaccatattactaaacatttaccgttaagtcaagtggtttgctgaataatattaactttttttgtttagttttctgttgctattcattttcgcttgtgttatactctacacaaacatatatgtttaggaggtttccatatggcaatcggacaacgcattaaattcttccgtaatagaaaaggaatgacacaaaaacagcttggggaaatactaggctttctcggcaaaacctctgatgtccgtatggcacagtatgagtcagaagccagagtgcctaagattgaccttgtaaaagaaatggccggtatctttgatgtcagcactcatgcgctcactgtacccaacatagacacctacatcggccttatgcacaccctctttacattggaagatgtgtatggacttaaaataagtgaaatagatggtgaactctgtctgcgtctggacaagtccaatcgtgacaactatacttccttgtttaatatgtttcaggcatggcagcaaatgtctgccaaattagagcaaggcgagatcaccaaagaggaatacgaccaatggcgctacaaatatccagaacttgacaactctcatcattgggcaaaagttccctcgaaagcacttagcgactttcttgtgagcgaattaaaaaaagaaaaataagcacaaaaaaccttaccgacttccttttccatttctggaaactgaaaatcagtaaggtttttctatgctatttgaagtaaaattattttatgagtaggtatcagatgttgccaaatcgttgccacgcattaaacaaatttgtttgaaacccacataaatactaggttctttcaacccacaaactcactcaaattcaatcgtagctggcggcttccccgtgcaatcatacagcacccggttaacccccttaacctcattcacaatccggctggtcaccttccccagcacttcccatggaatctgagctgactccgcggtcatgaaatcagatgtaagcacggccctcagggcaacagcataatcataggttctctcatcgcccatgcagccaacagaccgcatattagtcagagctgcaaaatactggcccagattcttgtccaccccggcctttgcaatctcttccctgtaaatcgcatcagcgtcctgtacaatgcggaccttatcagctgtcacctcaccgataatcctgacgcccagaccaggtcccgggaatggctgtctgaataccagatactcaggtatacccagctccagtccggcctttctcacctcatccttgaaaagcagccttaaaggctctaccagttccttaaaatctacatgctccggcagtccgcccacattgtgatgagacttgatgacagcagatttacccaggccggactcaatcacatccgggtaaatggttccctgtaccaggtaatccactgcgccaatcttctttgcctcttcctcgaatacacggatgaactcctcgccgatgatcttacgctttgcctcaggctcttccacgcccttcagcctggcgtagaaacgttcctgggcattgacacggatgaagttcaggtcatacgcaccttctggtccaaatacagcctctacctcgtctccctcattcttacgcagcagaccgtggtccacgaacacgcaggtaagctgtttgccaatggccttggacagcatgacggcagccacagaggaatccacaccgccggacagagcgcacaacaccttaccgttgccaatcttctccctcagagccttgatggtggtatccacaaaggaatccatcttccagtcgccggagcatccgcagacattatatacaaaattggagagcattctggtgccttccttggtgtgaaccacctcaggatggaactgcaccgcataaaaattcttctccggacactccatgccggctaccgggcaggagtctgtatgtgcagtgatgcggaagcccgccggcacctctgcaatgtacacgccgtggctcatccagcatacggtcttggaagaaacgccatcaaacagcttggaggaagtatccacatccacttctgtgtgtccgtattcgctgaccacagccttctttacaacgccatccagcaggtagctcataagctgagcaccgtagcagattccaagaaccggtattcccagctcaaatatctcctttgagcagcggggtgccccatcttcaaacacaacgtcaggtccgcctgtgaaaatgattccctttggattcatttccttgattttctccaggctcatatcataaggatgcacttcacagtatacgctgcattcgcggacacgacgtgcaatcagctggttgtactggccgccaaagtccaatacaataatcatctctctgttcatgagattcgttcctccattattttacggattttcccaccaaaacaattatagtaaaactgtatcccagaacgggtttgaaaataccctgtatccgacgccccacagcagcctgtctgatgaaagctgtgcgtaacccgcctgcttccgctgctgccagtgccaaaggtctaacctgatacaaaccatttccaaacccgcccttattatataccttgacccaatttaccgaaaaatatttattccctataaaattgaaagagattgtacagaatagtacaatctcttttttatctttcgtataaatatattataaagcagagaacgacaaatatcaagctatttcgacacttttttcagaattttttgctggctatttgacgagcatttatattatgattttttgccgagatttttctgccggaactcttcatcggaactttttaacaaactctcatcctccgccccatcttccgcactgcctcatcttctgctccgctccatcttctgctctgccgcaaaccctttaatcagataacttccttccgcagaatcctcgcaatcctctcctcatccagtccgcgtattacctccacggccattctgacagtggcgtccacgtcttcttccgcgcagaaattatagtggctgtgtacatacctggacggaatgcctaacaccagtaccgggaccgcctttcccgtgaggctgatttttccggcatttgtgctgccgccccggcgcactgcgtcctggtacttgattccaagcttatctcctgtctcctgggcaaaacgtatgaattccacgttggaaatgtagctgttgtccatgtggcgaatctgcacaccgctccttaagcatccctgggcaataccggcacggaaatagaaatcatccgccggtgatccctcaaacacaatggccaaatcaggctgaacctgctgtgccgtcaccgtggcccccctggtacccacttcctcctgggccgcaaatgcgcctaccacttccactgccagctggtccgcctcatcccgaagcgcctgcatggtgtcaataatgctcacacagcccagacggttgtcaaaagccttgccgtacagaattccattttccttatgatactcaaagcttacatccggcataatagggtcgcccgggcggattccatagacctccgtcacttcctcccggctgctggcacccacatccaccaggatatcctcgattgccagggagttgtcgtttttctgagccgctgtcagaaaatgaactggtttggatgtggtgattcccctgtgctttttcccgtcccttgtccttacgatgacagagtgggcgggcaggctggtgagatggaatcctcccagcatcagaatacttaaaagtccgttttccagtatggactgtaccatgaatccgcactcgtccagatgggcgtccagcatgagcacggggcgcccggcctttttcttcttcatggtggcgtaaacattgtacatagcatcatttgccacgtccaaacccccgcaccagttctttacttcccggatgacctcgtcctcaaatccactgggaccaaaggcattggtcaacgcttcgatttcttttatgtttgccatgatttcctccaggtatgagacgcaaagtgccgcatcacatggtaccgctcctgccataccatgcctgcggcactgcatctgcttaacttatttctgcttaacttatttcttctaaacttatttctgctttattgatttctgctctatttatttctgcctaacttatttctgcctaactaattctgctctgtttatttctgccttacttatttctgccttacttaatctgccttacttaatctgccttacttatttctgccttacttaatctgcctcacttatttctgcctcacctatctctgtccaacctcccctgtctccgcaggaaaagccttacagtgaaaccttcttaagctcctcaatcaaatccagaatatagtcggctgtggtctgtaccatctcctggccccactccacggtggcggtgtttggatgatccggtccaatccatccattgtctgtcacctttggtgtgttcctgagaatttcaatctcaacacccttgaagcgcacggtacggaagccggtagccaccaggttttcggtgagattggtcatttccagagggaggtcaatcttgctcatatctaccagtgaggggtcaactgccatgatgccagctgtctcctcgccgccgccgtgtccgcccttccactcaggcttcatatcccaggccatcagccaccagttcagcatcacgaccatggcgcccttcttgtcaaattccaggccgatgcgctcgattgtcttgatattccctccgtgtccgttgagcaccagaattttccgcgcgccgtgcttgtacagcccgtccacaatctggtatacatactggtacagtacgtcggaatcaatgttgatggttcccggataatcagccagtgactggcatgctccgtagggaatcatgggcgcgatgaggatgttgtcatttttctcctcaatcagatccaggattttgtcaggtatcagggtgtctgttcccagcggcatatggcgtccatggcactccgtactgccgattggaagaatgaccatgtcattttccttaaaataccgttccgctgttggccatgtaatctttgataatctcatgatgcatctctccttttacttctcttattttgcaacctttacatgctccagcttgtggtagccgattggatccatcacgaaaccttccaccttggcgttggcgcctgcggtgatggtgctgtagtagataggtgcgttgttgttcacttcttttaacttcacagccaggtcctcatatgctttcagtctcacggactcatctgcgctggtccttcctgtctcaatgagcttgtctacctcaggatctccgatgaagctgcggtttccggctgctccctgctgtgaggagtgttccagtgaatagtaggtgtagtctgcgtctgtggtggaggtcacccagccaaagtatcccatgtcatgctcccctgcggaagtcctggaaataaagctgccgaattccattacctcgatgttgcaggtgattcccacatcctgaagcatggcctgtacagcctggcatacctctacacgtgtctggttgtcatttacccagatgctggtctcgaatccgtttggatatccggcctcggccagaagggattttgccttctcagggtcatactcataagcgccagggctgaagtatccgaatacggccggtgcaatgatggcgtcagccggctctccggatccgctggcaatggtgtcgataatcagctggcggtcaatggcgtagttaacggcatcccttaccttctggtcatcatatggcgccttgttcatgttcatggaaatgtagtagcaggtcagggacggagcctcaaacagctggaggtcggaattgctccttaccttctccaggtcatttggaagcaggtcgtaagccaggtccacttctcctgtctccagggcgatggttctctgggatgcctcagggataaccttcataaccagcttctgtgtctctgccggtcctgcatagtaatcgtcaaagcgctccagggtaacggaatcgccctgcttccactctacaaacttatatgggccggtaccgattggatgaagcttgaaggcttcctcgtctgcctccaccactgcctttggaacaatggctgcaaatggtacggaaaggtttctcagagccggtgcataaggcgccttcagctctacattaactgtataatcgtctaccacgtccaccttgtcgataaagtcaacaatgtaggaaacagcggcggaattaatggccctgtccagggagaactttacatcctctgccttcacctcagaaccgtcgtggaatttcacgccctggcggatgtggaatgtgtaggatgtatcggaattctgatcccagctctctgcaatctggggctgcagctctccggtcgcagcgtcaacaacagtcagcgtgtcgaaaatctggtccgtaacctctacagccggcgtctcctttccctgatggggatctaaggaagtaacatccgctccctgcgcccataccagcgtatccttgtactcccctgaaccaccggcgcttcctcctgcctctgctcccttggaacctgcctctgtctgagcgctgccgccttccgtggaggtctgtccggacttggaacagccggctgcacttactgccattgccgccactaaggataatgcaatgactttcttccatgtttttctcatactagctcctctctttcttacatttctctctgtcaatattgctctctataaataccggaccacaggctcctgccctggatttctccggaatttaaccctgctcctgaaccatacggcagctcacaaagtgccccggctccatttcctttaaagtcatttcattgctggtacagccttccgttgcataaggacagcgctttgcaaacctgcatcccggctccgggttaataggcgatgtgagctcgccctttagcggaatgcgctccatcttaaagtccggatctggaaccggtatggctgacagcagcgcctttgtgtacggatgcatgggattcttaaacagtgccttggcaggtgctgactccaccatctgtcccaggtacatgaccacgatgtcattggaaaagtgccttaccaccgacaaatcgtgtgtaataaacatataggtaaggttcagctcctcctgcagatcctgcatcaggttaaggatctgggcctggatggatacgtccagggccgatacaggctcgtcgcatacaatgaactttggattgaccgccagcgccctggcgattccgattctctggcgcctgccgccgtccagctcatggggatatgtgtttaccagacgcttggccagtcccaccaggttcatgatcttctccacctgctgtgtgatggcggccttttcattgggcttgtaaataccctgcaccagcagcggttcaatgattgcctcgctgaccgtcatcctgggattcagggaagcaaaggggtcctggaatataatctgcatatccttcctcaaatccttgagctgcttcttgttgtagcccaggatatccctgccctcaaaataaaccttgccgcttgtgggttcgtgaagcctcaggatagcccttcccatggtggattttccgcatccggactcccctaccactcccagtgtctccccggtacggatggaaaagtttacatcgtccaccgcgtggagagtgcccttgggggttgtaaaatattttttcagatgttccacacgtaatatctctgttttctgttcctgcatatgtcaatctccttttcttagcggtagcggatgcagcggacctggtgggttccgcctacagtcaccatcccaggatgggtcttggaacattcaggaaccgcatacttgcacctctcgcagaaaacgcagccctcaggcagcttggtggggtcgggcatcatgccgtcaatggcctgaagccgcttcacatcgcttgtcaggctgggaatggaaccaaagagtccctccgtgtacggatgttttgtgtccttgtatatttcccgcagggttccgtattccaccacttcccccgcatagatgattgccacgtaatcacagttctgggcaaccacccccaggtcgtgggtaatgaggatcatggatgtgttattttcagatttaagcttgtatatcatctccagcacctgggcctgtatggtaacgtccagagccgtggtgggctcatccgcaatgagcagcttggggttgcaggccagggcgattgcaatgaccaccctttgcttcataccgcctgaaaactggtggggatactctccaaaacgctctgccgggattcccaccctttccagcatgttttcagcccattttctggcctcctgcctggacaggctggtgttgtggttctcgattacctccatgatctgctcgcctaccgtgagcaccgggttcagggaggtcataggatcctggaatatcatggaaatgtccctgccgcgaatggcctccattccattggtggaaagcttcaacaggtcctgtccctcaaaaatcacctctccgcccagaatcttgcccggaggattgggaatcagcctcataattccttttgccagcgtggtctttcccgcaccggtctctcccaccagtccaagggtctctcccacgccaatatgtatattgacgccgtttagcgcctttaccactccgtcatccgtttcatagtggatgaccagatcttttacttccaataatggtttatctgccatgtcatactcgtcctttcttagtgttcatccgtcagctcttcaaacgcgggtcaagggcatctctcagtccgtctcccaccaggttaagggccagaatggtgagcatgattcccatgcccgggatgatggtgacatgccatgcgtcgcggatatagcttcgggcattggacagcattgcgccccactcaggggtgggcggctggatgccgagtcccaggaaggaaagtcctgcgatggaaaggatggctcctgcgattcccagggtcacctgcacgataatgggcgccatggaattgggaatcacgtacttgatgatgatgcgccagtcgctgcacccaatggagcgggccgcttcaataaactcctggtccttcaccgtaagcaccgatgcccggaccgttctggcaaaggtgggcacataggagatggcaatggcaatcagcacattggtgatgctggtccccagggccgccacgatggcgatagccagaagcatggacgggatagccagaagaatgtccataattctcatgatgatattgtcagcggtcttgccgtaataccctgcgaaagctcccaggagaccgccgaagatacatgaaatgatgatggccacggttcccataaacagggagtaccggaccgcccaaagcatgcgcagcagcatgtccctgccgaactcatccagcccaaaggggtgtgccaggcttggtccctgcagacgtcccctcagatcctgctttaccacgtaattcaggtaaatggatttgccggtaaccgcgtcaatgatgatggttgctattgctatgatgaccagtgccaggataaaatacatgccaatcatggccagccggttctttttgaatctgcgccatgcctcgccccacagggagcgctggtcgccttccgcttccgcggcaatcagatgtttctttcccatgaactgcacctactttctcttgtattgtgatttaattctcgggtccacaaaggcgtatatgatgtctaccgccaggttaaccacggtaaacatgattgccagaaagataacagaccccaataccatgggaatatcttttgacttgatggaatccaccatgagacgtcccaggcccggccaggaaaatacggtctctgtcagcatggcgcctcccaaaagggtgccgaactgcaggcccactgccgtgataatcggaatcatggcattcttaagcatgtggcgggtggtgattttcttatcggaaaccccctttgccctggctgtgtctatgtaatcctgacggataacctccagcatggatgagcgtgtcatacgcgtaatcatggcagcagcccctgtgcccagcgtcaccgccggaaggaccaggctcttgatgagaggtatgaatccctcccccattccctgtgaaggcagccagcccagggtcagcgcaaacagaataaccatcagcaggccgaaccagaagttaggcatggccacgccaatcagtgagagcagcatggctgtattatccatcatggaatactgtttcttggcggaaataattcccgtgggaattcctatcagaatggctaccaggatacctgccactgccagcaccgctgtgttaggaaaccgctccataacctgcgaccatacgctcaggttatttttataggatgtgcccaggtcgccgtgaagcatattaatcatataatgtccgtaacggaccagcagagggtcgttgagtcccagctcctccctcttcatggccagcgcctcggctgatgcctggtcacccaggatgattgccgccgggtcgcccggtgacaggttcagaatgaaaaacacaatgaacgtcacgccgataatgaccggaatcagcataagcagtctttttaacacatacttgtacatttctctctctccaatcctcgtatatttgctgcattaacgcagcgaagcaaaatacatatttcacaaccccgcacaggggtttgaaaccaaaataataaaaaagaagccttaggatttgaaactccctcgcttcattcaaattataaaacaatatatctaaattgtcaacaatcattgtttaaattttacactttaaatattttgtcaacatttctattgtgctttttttcaaatctatgatatacttgtctgtatattaaatctaagtgtctctctggggcgcacacatcctggagccggcacatgtttgggaggtaagaaaatttgaaacagattggcggattttttacatatgaaccactgcccgaaaccgagaaccattatctggaaaacctatgcccgccaggaggaagcctgcgctttttcatgtccggcagatgtgccaactactatgcgctccaggatatctgcctgaccgacaccaaaaaagtggcctatgtgcctgtctacacctgcgagacagtcctggccccttttctgaaagccggctatgaacttttattctacgatgtatccagggatttgacccccatttttgatgaaagggtcctggaccgcatcagcgttgtcaatctctgcggctattacggcttttgcagctacgacagggaatttatacggaagtgctccgaacggggcatcatcattgtggaggatacgacccactccatcttctcagccgacggtgttgaccctcactgcgattatgtggtgggcagcatgcgcaaatggattggagtaccggctggtggattcgctattaagaggaaaggcggcttttcccttcccgttctgcctcctgacgaaacccatctttccatgcgcagtatgtccatgagaggcaaacagcagcttctgcaggcagggactcccgacccccaggccatgcagaagttcaatgataccttctgggacgccgagatgatgctgcgccgcatctttgattcctatggaagcgaccgggattcagagtacatcatccggcactatgactttgagcagctgaaacagagacgccgtgccaattaccagtatcttctggagcatatgccggaacatccccagattaccgtgatattcccggttcttaaagagggtgctgttcccagccactttaccgtgtatgcaaaggacagggacatggtccagtcctatctggccggacaaggcgtcaagaccaccacctattggccccagggccccatggtggacaccgaaggccatggcgacgcggactacatctacagccatgtgctgtcctttacctgcgaccagagatatggaactgaggatatggaatatatatgcagacagatagaggggatgcctgaagagtaagagctgaaacatagaggaagcatatgaattaaaagtatgaaccgacagcatgatcgaacacatacatatatttaaaaagcggaaatacgggaacgtgatacaatcgtcttcacgtcctgcatttccgcttttgcacatccgcttttattttttgtccctgtgcatccgcaattacacatgataaaacagttcctggttcttcatcttcattccgatccggtaaattctctcgccgttggctatgtagtgggtattgattgcgctcctggactgttccaggttcccccgctgcaggatttccaaaagccatttatgctccagatagttgtttccccgccgtcctgcctgggcagcaatgtcctcctggtccaaatccacctgttcttcagacacatacccgttgatttgcttgatggtatagaacatggctccgtttaaggggcttaatgtctcccacagactggtcagacgctccatctggcctgataataaaatctgtttatggaatatctcatcatactggatgattttccccatgtcgtcctctgacactgcctccttcatggccagcaccgcatcctccataagaaaaatgctgtcgctcaggagacggcccccgcaccgctccaaagccaggttttccaggttgccccgcaaaaagaatatctcataggcatccttaggcgaaagcatggtgacagagtaccctttattggtctcataatccagaaacccttcgtacatcagctgcttcagcgcatcccgcaccggcccccggctcatccccagcgttacggctatatcattttcaaccagcttttctctctgagccagctttccctgaagaatctgctccctcacataatctgctgccacctctgaaagacttctttttttttccttatccattacaatccccgctcctagcactgctctttaacctgtccattataacgtaggccctgcgcaaatgtcaaaggattttcaatatccatgatattttccagattgtccgagctgtaaaaagaccggctgacagaccggttcctgaactgagccggagccgctatggcatcacattccatctccacacaggcacagccctacgccttcctgcgggccgccttatccctggtttccctataaattccgtctgttgtccacaccttttccattctatacctgattcctgtctttttagaaaaaggcggggactacctcatccccgccgcgctccggccgctcccggccgcatctgctgtcataactgttgtcaattcagatatttctttacatacattcccgtataggacaccggacaacgggccacttcctccggtgttccctttgcaatcaccgttccgcccttgtccccgccttccggaccaatgtcgatgatataatccgctgtcttgattacatccagattgtgctcaataaccacaaccgtgttgcctccctccgacagcctgtgaagtatatcaatcagcttatggacgtctgcgaaatgaagtccggtggtgggctcgtccaggatgtaaatggtctttcccgtgcctctcttggacagctccgtggccagcttgattctctgggcctcgccgccggacagctccgtggacggctgtcccagccggatgtatcccagtcccacatcatacagggtctgtatcttcctggtgacagagggtacattttcaaagaacttaagagcctcctccacggtcatgttcagcacatcgtagatgttctttcccttgtacttcacgtccagggtctcacggttataccgtttgccgccgcatacctcgcagggcacatatacatccggcaggaaatgcatctcaatcttgatgatgccgtctccgctgcacgcttcacaccggccgccctttacgttaaagctgaaccttcccttgctgtacccctttgccttggcgtccggagtggaggcgaacaggtcccttatgaggtcgaatacgcctgtgtaggtagccgggttggacctgggagtacgcccgatgggcgactggtcgatgtcgataatcttatccagctgctccacgccctcgatgctcttgtgcctgcccggtatggttctggccctgttcaacttccttgccagggatttataaacgatttcattcacaagggaacttttgccggaaccggacacgccggtcacacatgtcatgattcccaggggaatgtccacattgatgttctttaaattgttctccgccgcgccctttactgtaatccagcccgtgggctttcttctctcggcaggcaccggaatcttcacacgcccgcttaagtaagctcctgtaatggaatccgggttcttcatgatttcctcggccgtccccatggcaatgacctttccgccgtgctctcccgcaccgggtccgatgtccacgatgcagtccgctgcccgcatggtgtcctcgtcatgttccaccaccaatacactgttgcccaaatcccgaagatgggtcagcgtcttaaggagcttgtcattatcccgctgatggagtccgatgctgggctcgtccaggatataggccactcccaccaggccggagcctatctgggtggccagacggatgcgctgggcctcaccgccggacaaagtgcctgtggcccgggacagggaaagataatccagacccacgtcaatgagaaagcatatcctggccctgatttctttcagaatagaagcgcctatggtctcctgcataggagtcagcttcagcccgtccatgaattccttaaaccggactatggacatgttggtggcttcatatatattcatcccgcccaccgtaactgcgagggactcttttttaagcctctgccccttacagaccggacagggggtaatccgcatataggtctcatattccgccttggacgcttcggaaaaagtctccttgtagcggcggtttacattctcaatcaggccctcaaacgccacgtcatagacgccctcgcctctctgactcttatagcggaccttcacctcccggcctccggttccgtataacagcacatcgtggatttccttggggtaatcctggaagggcgtatccagcctgaaatcataagcttcggacagcgcttccaggattgcccttgtaaagctgcccttgtccgcacaggactgccatcccatgaccacgattgcgccctggtctatagacagggacttatccggaatcatcaggtcctcgtcaaattccatcttataccccaggccgaaacactccggacaggctccaaagggattgttgaaggaaaaactccttggctccacctcgtcaatgctgactgcacagtcaggacaggaaaagctctggctgaaattcaccggctcaccgccgctcacatccaccatcatcagtccgccgctcagggccatgactgtctctatggaatctgtaagccttttttcaataccttcctttacaatcagacggtccaccacgatttcaatgttgtgcttgatgttcttctccagccggatttcctctgagagctcgtagagattgccgtcaatgcggaccctcacataaccgctctttctggcctggtccagcacctttacatgctcgcccttgcgccctctgaccacaggggccagcagctggattttggtccgttcaggcatggacataatctggtccaccatctggtcaatggtctgtttgtgtatctccttgccgcattttggacagtggggtataccgattctggcatataaaagcctcatgtagtcgtagatttccgtaaccgttcccacagtggaacggggattccggttggtggacttctggtcaatggaaatggccggcgacagaccctctatgctctccacatccggcttctccatctgtcccaggaactgcctggcataggaagacagagactccatataacgcctctgcccctcagcataaatggtgtcaaaagccagggatgatttgcctgaaccggacagtcctgtaaggaccaccagctcgttcctcggtatatccacggaaatatccttcagattatgctcattcgccccgcggattttaatgtactgctttgccatcgaacatgctccttgtcttttatcttaattggcttcttgtaaaaatgttctttctgcatagcgctgatacacagcgctgacagcctctagtatagcacatcgcctatgcatttgcaaacatttgttcgatgaattgctgcaaaattactggaacctcttccagcagactcctggcgtgaacccgctccgacatctggtgcgcatccttgccgatggggccgaataaaagggaggggaccctgaaatccgccatggcatccaggtccatccggtacatggttccccacagaggggcattgaccgcataggaggccatttcctcccgatccggtcccccgcagtagcttaaatccgatatcccgcagcagtaattgcgctttccaagacagagaccgcaggtgtcctccgccgccttttgcagcaggttatagagacgggtaccctctcctgcctgtatacctccctcctgtatacctccttcctgtatacctccagtccgtcccgccctatctgtctcccccagccagtcgctgtgaaaggccggataatatggcggcgcaaaagatataatcatgacaggcgaagtgatgcccgaaaacgtcagcatggcatccatcatttccagcgtagcctggggataattcatggcacctgttcgcacgtccgactctatttttccgtaaaggtcctgataccatttcccatatccttttttcttccggcatatctctgccagctccccgtactccagcacgcagtgttccaagtccaccttgggcaggatatttcccgacctgaccaggacttcctggctctccatccgcttcatataggacgcaaaggaccgccggcccatttccttcagccgttccatgacctggctggtggtctttgaaaatcccagcatactcatatatccggctgcccgcagggggacagacacatcatatccgtacttgcggtcccgcaaattaaaccaggtgggaggaggacaatgctctccctcaaaggtctcggaaaattcaggcgccagttccgtggccataaacatctccgccagcacgccgatggcattcagtccgtgaaagcattccaccacatgcgccttggcgccctgtacaagaacagccggcatggttttgcccacagaccctatatagacctgctgcttgccgccctcattaaagctgggctccaaatccacaagacagtcatatgtaagcccatattcctgccgcagccctgtaaacagggaaacagctcccctcatccccgcagaatatgcctcctcgtccgccaccgccgcaaagagcaggtttccggttgtctcaggatattccagcaccttctgtccaaaccagtccatgatgacaaggccaatggaaagcccgcctttcatgtcgttcactccccggccgaacagccactcccctgacgccaaatcatccctggcctcctggggcagcatggacttaagcgcctccagttcctccccgtggatgtgcttccatgcctccatatcatatgccagggcgcggaaccgtccatactcgtccgtgtccaccacgtcgtaatgaccggtaagcacaaccgtcccggctcccttccctctcacaaggccgtacacaacggtccgtcccagactgtcgccttccagagcgcactgcccgcagagggacgggtgtttcgcaaaatagggctggcgttccagacatcctgcgatatagtctgaaacctccttctcctgtggggtgttggacacgctgggaatggaaaccatcccccgcaggtaatcatatatctgtttttcaaacaacaaagcaaacgcctcttttcctgaatactgcctttattttatatatgacccagtatattccattcattccgggatatcaatacccattgtataacctgcacaaaaaaccttgtaccaaaatggttgttttaacgaaaataaaattccctgttttaaaaaaacaacagggttgctatcgtagatgcagaaaacaagtttgttattacgtaagggtaagcaagactgttaataatactttcacaggggtattataagcagtttttttatatcatgaaattcctgtattcattttatttcagatatagcggagggaaaaccattgaaaaacatcagagtcctgaatacaactgcggtggtgacactgaaccgcaaagaccctcccgggccggttagatactgatattctatccgtcctgcgggagggtcttttatcttactcatttatcaattttattttttacttatctgtttcgttttttacttctctgtttcctgtactgcatgacgattctttccctggtatccggcctcaataccctaccgttcttccctgaaatacggaagtcccaggctctggggcggctggtattctctcttctttctcaggctggttataaccaggaccacaatggtaaccacgtagggaagggctttgaatatctcctgggcgcccctgtccaggccaggtatatacagataaaggatgtacagaccgccaaacaggatagaaccccagatggcattgaccggtttccacagggcgaagatgaccagggcgattgcaagccagcctctgtcgccgaatccgttgttggtccaggtaccgccggagtattccatgacaaagtataatccgcccaggccgctgatgcctcctcccaggcaggtggccagatacttgtaggccgttacattgatgccggccgcatctgccgtggccggactctcgcccacagccctcaggttcagtccacgtctggtcttagccaggaaaaacgccaatgccagggccagggccactgccagataagtcagaaatccgtaggagaaaaaaatctgtccgatgacgccaaacttggacagtccgggaataggagtcttataggcagcgcctgtcactgccacggaaatctgtcccactccccctgccagctttgccagggaaccgccgaagaagttgccgaagccaaccccaaaggtggtaagggcaagacctgtcacgttctggttggcccgcagcgtgatggtcagtacactgtataccagtcctcccagggcagcgcacacaaaggcgcacacaaaggaaatcagaagccccaccagaccgtttggattggctgtcccgttttcatacaggaaagccccgatcagtccggcaatgccgcccatatacatcatgccgggaatacccagattcaggttgcctgatttctccgtcatgatttctcccagggctccgtacaggatgccgataccctggccgattgctttctgaataaatataactaaaaaacccatatttcagcctccttatgacaattttgcccctgcttctttccgtttgctgcggattcccaccttgtagttgatgaagaattcacagcccaggatgaagaagaggatgatgcctgttattacatcagaggcattttcattcaggttaaactgggaggcaatctgcccggctcccttttgcatgaataccaggaaaaacgacaccaggaccatggcaaatgcattgaacttgctgagccaggatacaatgatggccgtgaatcccctgccgcccgctgtgctggtggaaatggtatggctggcgccgctgactatgatgaagcctgcaatgccgcagatggcgccggacagggccatggtgcggatgattaccttcttcacattgattccggcgtacctggccgtgttttcgctctctcccactaccgcaatctcatatccctgcttgctgtacttcaggtagatgaagatggccagggtcagcgccagcacgattaccaggttccagccgtactccaggccgaacagctttggaagccatcccccctttgtggaggagttgatggttcccacggagttggatccctttggattctcccagaaaatgatgcagtatgtgatgacctgcatggccacatagttcatcatcagtgtaaacagtgtctcgttggtgttccagtatgccttaaaaaatgccgggatggctgcccagaccatggctgacagggcgcttcccaaaagcatcagcggaaacagaaccaggggaggcagtgaattgcccaggtaaatcatcatggccgcggatgtgacgccgccaatcagaacctgcccctctgctccgatgttccagaaccgcatcttgaatgcaggcgtgatgccgattgctatacagagtagcaccagagtatcgcgaatggtcatccaggtacgccttttggtacccactgccccgtcaaagattcctttataaacctccaggggattaagccctgtcagggcatagatgacccctgcacagaccaccagcgataagagaaccgctcccagcctgatggcccaggccttccacatatcaatctcatccctcttggaaatatgcatcagaggttccttgttggacactgccgtcatctccttactcacttaatccacctcctgtcctggtcatcatcagccccacctgttccttggtcgctgtcctgccgtccacaacaccgtttacctgtcccgcgcacagcaccaggatacggtcgcacagctccagaagcacatccaggtcctcgcccacgcagataacggccgctccctgtttcttctgctcattgaggagatgatagatggtgtaggatgagttgatatccagtccgcggaccggataggccaccataagcaccttgggattggaagaaatctcccttcccaccagcaccttctggacatttccccctgacagcttgcgcaccggagtggcgacgccgggggtcacgatttccagctcctctatgatctgctccgccaggttttttggcgtctttctgtccgtaaagaaggaacgtcccctgcggtatcccctgagcatcatattgtccgtcatatccattgctcctaccagtcccatgcccagacggtcctccggcacaaaggaaagctttatccccagcttattaatggctgaggcgctcatgccggacagctgcttttcgccgccctccggcggataataggtgatggttccgcccgtcatgggttccagtccggcaatggactccaaaagctccctctggccgcttcccgcgataccggcaatccccagtatctccccgctgtaagcagtaaaggaggcatggtccagggtggtcactccctccttgtccacgcaggtgacgccttccaccaccaggcggcgctccgggttcacaggatccgggcgctcgatgttcaggcttaccttcttgcccaccatcatctcggtcagggattcctcggtggcgtctgccgtatataccgtaccgatatactggcccttgcgcagtacggacacccggtctgacagcgccagaacctcatggagcttatgggtgatgataataatggaatggcctgcctcacgcatgttgcgcagcactgcaaacagcttgtctgtctcctggggtgtgaggacggctgtgggctcgtccagaatcaggatatccaccccgcggtacagaagctttacgatctccacggtctgcttctgggatacggacatggtgtatatcttctggtccggatccagctcaaacccgtatttggctgtcagctcattgattttggcggacacagccttcatgtccagcacttcccttcctgacagtcccaggataatgttctcagccgctgtcagaacatccaccagcttgaaatgctggtgaatcatgccaatacccagagcaaaggagtccttaggcgaacgaatggtaacctcctttccgtttacgaatatctgcccttcatccgggtagtagataccggaaatcatgttcataagggtggtctttccgcttccgttctcacccaggacggacaggatttcccccctttttacagacaggcataccttgtcgttggcagttaccttgccgaaccgttttgtgatatttttcagttcaattgcgtattcttcgctcacccggccaacctccgttctttgtatttagccttgttgcattgtctcgtggaaaaaagcggagccagatatgaatggctccgcttttacagcctttaatttccagcgggaaattatagcatctgctatcttagttgtcaattgtggtgataccgtcaatcaggatgtcaaaggcaggtgcggaaccaaactctgactcatggaaatatccgtcggagatatattcaatgtcgctgccgtccttcttatatgtatccagtgtctcgccgccaacggtccatgtggaggtgtcgaatacatgaagctcaccggatgccagcttggcctctacctcatccaccttctcctttgttccgggtgccacagccgcctcgttcagctctgtaatcagcacagcgccgtcagagaagcccttgcaccagtcaaccggaatctcggttccgtcaatgacatgctgtacagcctcagtcacatatgcagcccagttattggaagcagatgtaagagcctgttttggagcagtggcaatcatggaaatgttgtagcccacgcatggaacgcctgctgcctcacatgcggtaggagcgccggtggtatctgcatgctggctgatcagaacacatccgtcggaaatcagggcgtcagccgcttccttctccaggtcaaagcttgcccagctgttggtgtacttcacttccatggtggcgtccgggcatacggaacgcacgcctaagaagaaggaggtgtatccgctgataacctcagcatatggataagcgcccacataaccaatcttgcacgcatccgccttcacggttccgtcctctatcatctggttcagcttcagtccggccacaacaccggatacgtaacgtgactcgtagatggatgtgaaatagttgtgcatgttgctcaggccgctggaagctgcctggaagccggttgcatgacagaactggacatccggatactcctttgccgcctcaatcacataggactcatgtccaaagctgtttgcaaatataatctggcatccctggtccgcaaggtccatggccgcatcctttgcagtctcatcctccgggatgttccacttaacgataatctggtcatcgttcaggcccagtttttccttcatctccatggcgccgttgtaatgagcggctgtgtagccctcgttctcatcgcctatgtagacaaagccaatctttaaatcttccttggcaatgccgcctgcggccggtgcttctgaagcctcggtctccttggtctctgcatcctctgccgccgcagttgtctcagcctcagctgttgtggctgcgtctgccgcagtcgtctttgctgtgtcagatccgccgcaggctgccagtgatactgccatcacgcctgccatggccatgcttgctaacttttttaatttcataatactctcctccatgaagtgtaagtttgcagaacccgattaaaatacgtcaggtactggctgctccattacacctgacgttccatcgttgtcctacccattaaaaagtaacacaaataccagttaagtatatctacttttttccctattgtcaatattaaccagggaaatcgacccatttttacacaataagacaggattgcttttatttatcagcaatcctgcctttcattcttaagccatgcttataatttagtttctttcagctgcattttcataaaatacttcgcacataacacctgcaccgatgcggaacccatctgtaaaacactgggtcttctcaataaaggttagctccaggtaatgttccatcagaaggtcgaattcctccttcatgtccctgtccagcttgtcggtaaaccggttgaagtcgtccatggactgcctggtcagtgcatcgtattccgcgttgccgcgtatggtattttccgccgggcataagtcccccctgtacaactgctgcaaaatctttcccatacctttttcctgcctttcttttgtcaaattattttcacagaaaggcgggggccgtcacgccgcattctccatccgctctcaactcattctctcatcaaccaatcatcttctctcatcatctataaaggatatacgcagcgcagggctatggctcccccacctgtctatatatccaggatagcacagcccgtggtcaaatgcaactaaacatatcctattctccccggacctgctcttcttctccacggttgaagatttccatgaattcgtctcctgtgatggtctccttctccagcagataggcggctatctcatggagcctgccttcattttccctgagaatggaaagagccttcctatgctgctccttcacaatggacaccacctgttcatctatgcgctttgccgtgtccggagcgcaaatcagggatgtgtctcctcccagatactggttgttcacggtttccatggccaccatgtcaaactcatcggtcatgccgaaccgggtcaccatggaacgggcaatcttggtagcctgctcaatgtcgttggacgcgcctgtggtaatggaatggaaaatcagctcctccgccgcccggccgcctgtaaaggtggcaatcttatccagtgcctcctcccggctcataaggtagcgctctccctgttccacctgcatggtatatcccaatgcccccgatgttctggggataatggtaatcttctgaaccggggcgctgtggctctggcaggcagccaccagcgcatggcccacctcatgatacgccacgattctgcgctccttctgggaaataaccgcatttttcttctggtatccggcaatgaccgtctccacgctttcctccaggtcggcctgcaccacggcgctgcggcccatacgcactgccctcagggctgcctcgttgatgatattggccagctccgcgccgctggcgcctgccgtggccctggcaatggcattgtaatccacgtcatccgacatcttcacgttttgtccgtgaacctttaagatagcctcacgtccctttaagtcaggcagctccaccggcactctgcggtcaaagcggccgggacgcagcagggccttgtccagggactccggacggttggtggcagccaggatgactacgcccttctttccgtcgaaaccatccatctccgtcagcagctggttcagggtctgctcacgctcatcgtttccgctcatgcctccgccgtcgcgcttcttgccgatggtgtcaatctcatcaataaatacaatacacggcgccttatcattggcctgcttaaacagatccctgaccttggcagcgcccatccccacaaacatctccacaaattcagaaccggatatggagaagaaggggacgtgggcttctcctgccaccgcccttgcaagaagcgtcttgccggttccgggagggcccaccagcagcgctccctttggaagatttgctcctatatccgcatacttctgcggattgtgaaggaaatccacgatttcctttaaggcatccttggcctcctcctcacctgccacatcggcaaaggtgattcccgtctcattctctgcgtatatctttgcattggactttccgaaggtcatggcattgctgccgcccatgcgcttggaaagcatgcgccccataatatttccaatgaccacaaacatgagaatgggcgcaacccaggacatcagaaagcttaagagcggagaagcctttgtctggatttctcctgtaaaattctccacatccgcattctgcagccgcttaaccaggtcgtctcccggaatcggtcctgtcttatagctgacattccactgcttctggtcctttttcgtaaactgaatctgtgattccccgttgctgacgtacacatccttcacattaccggcgtccagttccttcaggaactcgctgtacggcacttccacggaatgctccatcatgggaaatacaagggcatttaataccatcactgccaatatgaccaggaaataatagtaaatgaacggctttttaggcgtgccgctttttaagtttctctttccgctgtcttcattcgcacccataccaggtctccttttcttaattcatactcataggccgggatacacgcagcctgattccagctacatccgcttcccgctgttcaccatgtaagataataccatttgcaacttttgtcaatggttgattgtaagtttttatttacttttaatatttattgactttttacaccagatatgataaaacgattacagaatagagcgaggaggtaatcggcatgaaccgtgaaccagcagacagcagacatgtgggggaacatttcatggaatttgccattgatttttttaatctggcaaagaacagctaccaccagcagaaccagatacgggcgaattccgctgctttccaggtcctgatgcagttaaaccagccggacagacaggcgcccaccatgtcggagatggccctgcagctgggcattaccaaacagcagctgacaaagcttatcaatgatctggaagaaaagaacctggtccgcagacagcacagctccaggaaccggcgccatgtatatctgatgattacaccggaaggcgcatccatcatgaagcagctgagggaagccatgctggagtgcacggtgtcccgcctttcctcgtataatcaggaggaactggcggagctggacgactgcctgatacgtttaaacaccctgttggagaaattcgcggctgcggaggatatagcatcctgcggggattttcctgagttgtagggaatgggggagaggaatggggagaggtacgcggacgcgtgtggtgattcgcgtccatgagagacgggaatgcggggcaaaagatggccgtttccgcagtgggagagactaaggcgcaagggacaggaaaacccggggaccgcaaaaattacgccggactcctgatgagtccggctccatgtttgctttgcttcgggcgttgagcgccctgcgcaaccccggcttttcctgtcccttccgcctaagtctctccgaactgctccaaagccacctcctgccccgcgttcccgcctctcacccactgcattcttcctgcgtccgctgtgtattccccgcagcgaaaaaaataatatccccgctaatgatattggacaattggcggactttttgcccgcttagattgtatccttgataattaatcctaaactaaaaggccgcatatcaagataatgcggtcctctttataaatggtatgccatctacccaggcatgccatttttcttctgatttggatataaacgatggaggtgctatgatacgcagcgggccctacggttagatctgcaggcttggttctggcgtggatagcaggtgctgcatggtgcatcctcatccctctttacaataccttacttaagaaggacttcagacgctcatttttagggttggagaagaattcctccggtgcggcttcctccataaagtgcccctcgtccatgaacataaccctggtggctacctctctggcaaagcccatctcatgtgtcaccaccaccatggtcatcttttccctggcaaggtcgcgcataacgcttaatacctctcctaccatctccgggtccagggcggaggtgggctcgtcgaacagcatcacatccggcttcatgcacagagcccggacaatggctatacgctgtttctggccgcctgaaagctggctgggatatgcgtgagccctgtctgccagtcccacacgctccagtagctccatggcctcatcctcggcttccttttgtccctttccctgaagctttatgggagcaatggtcaggttcttcatgatatccatgtggggaaatagattaaactgctggaataccatccccattttctggcggtgcttgtcaatatctgtcttagggtccgtgatgtcggtgccctcaaagaaaatgtgcccgcttgtgggctcctccagcaggttcagacatctgaggaaggtgcttttgccggaaccggaaggccctaccacaaagaccacatcccccttgtggatatccaccgtgattccctttaagacatcaatggagccaaagctctttcccaggtcctgcacccggattaagggctgtccgttaaacattcctgtattaccgctcattctgtctcagcctcctttccagtatctgtatcagctttgtaaatatcattacaatgatgagataaataatggcaaccgcaatcagcggcataaatgcactgtatgtcctgcttcggatgatgtccccgcccttggtcaaatcctggatggcaatgtagccggataccgaagtctcctttaacagggagataaactcgttgcacagggttgggagtactgtcttaaatgcctggggcatgatgatgtaccacatggtctgggcatagttgaagcccaggctgcggcctgcctccatctgtcccggatcaatggacatgatgccgcttctgaatatctccgccacataggctcccgagttgactccgaaggccaggatggccactatgaccttgtctaccctgacgcttccgaatacaacaaagtaaatgattaacagctgcaccaccacaggggtgccccggattacggtcaggtacactttacagattgcattgagcaccttaagcttatgggtcttctcataggtggatcgtatcattcctaccagaaatcccagcacaatgcccataaggcaggcaaaaaaggtaataatcaacgttgttttcagaccctcggtcagatatttccaccggttgtctgacacaaagttcaggtaaaacgcatctgtaaatgtcttccacatgctcatcatcctctgctctttctttataattcataaggcagggcagacgccctgtttctcctctgtcatacagtcaaaaactgccgccctgcaggaacggggatgcggtgcagtattgcacctccctttctgcagcctgcggcagttttataccggccgtcttcctgtatatgccggtactgtcatgtctgtcttaagtaggcgattccatacccggtacgattactcagccttgatatacttggctacgatttcgtccagtgtgccgttgtccttcaaggtcttaagagcgccgttgattttctccagtaactctgtgttgcccttctttacagcaatggcatactcttcatcggtaaaggactcatccagaatcttcagtccttctgtctcagcaacaaaggtcttggcaggctctccgtcgattacaaccgcgtcaatcttgccctggctcagtgcctgaacagcctcaaagcccttgttgtaacgctctaccgtggttccgtcagcttccaggtcagatacatagatatcgcctgtggttcccagctgcacgcctacgattacaccctttaagtcatcaggagaggcaatctcgctgtcctctgtaacgatgattttctgggatgcctttgcataggtatcggaaaaatctacggactgcatacggtcttccgtaacagtcataccggccagacccatatcagccttaccggatacaatctcaggaataatagaatcaaacgcaatgtcctcaatctccagctccatgcccagctcatcggcaatggcctttgcaatttccgcgtcaataccaacaatggcatctccgtcatgatactcgtaaggagggaactctgcgttggttgccatgacaagcttgccgcctgctgcttccttggctgcctcagtctcagccgcctctgcgctggtctcatccttgctctcggctgccgtggtatcctctgccttctcctctgctgttgtggctgctgctgttgtctcttttgcaccgccgccgcaggctgtcagggaagctgccatcagtgccgccatggtgatcgctaaaaccttcttcttcataataatattctcctcttttcttttatgcatcaaattgcataactataaatgtattcaacattttatattataatgcatttttctggtttagcaagaggaaaatacgggaatcaccaaagaatcagcaaagatgccgtctaattccctctctgtctccggcctgcaagcacaagatgcttggccagcacggccgttgtcacggcccctacgcctcccggcacaggtgttgccatggatgcaagaggctctatggacgggaaatccacatctccgcataattttccattttcatccacattaatacccacatcaatgactatggcatcctgtcccacgtgacggccgtccagcattttagcctttcctgctgcggccaccaggatttcagctctgcggcactctgtctccagatccctggtcctggtgtggcagatggtgaccgtggcattttccttcagcatcagcatggacagcggacggcccaccaccatgctgcggcccacgatagtcacgttctttcctgtcatatctatctcattggccttaagtacctctatgaccgcctctgcggtacagggcgcaaaaccggttttgtcccctgcaaataccttggcaatattggccggggaaatcccgtccaggtccttttccgggtcaatcatcttctcgatgtccgtctccgcaatctgctttggcagcggacggagcaggaggattcccgatacatccgggtcacggttaatggcactgaattcagccttgaaatcgctgtcgcttatctgttccgggaacacatatgtctggaccctcaggccgaagttctccatcttcttcacagccccccgttcgtaggacatatcgtccggtttttcccccacccgcacaatggccagcttcggagccgggccttccagaccttccatcatctgtgttacctgttccttgatttttgccgaaacctcggcgccttttaatattttcattttccttctccttcctttctgcctgacaccttctatctcagctgctcaagtaccttctgatatatgcggtccgctgcttctgtcccctctttaatcaggcgttccgccttctcgttcatttcttctgccttctccctgttcttcatggacttggtattgatgtacacattcatcaccgcgcccagcagtgcggtccggatgaactggactcccacgcccacatcgctgacagccatcctgcttcccttatccgcaaggatatccatgatttccagcatttcccatgccttttccatgatttccattggcacaagactggcatccaacagccgtgcttccatgacctctgccttgtatgccttttcttcctctgtacctgagggaaggctgtagcatttggccagaggcgcaaatacctttgcatcctggtcagccagcgcgctaaactgtccctggattcccttcatccgctctgccagttccttaatctcatcctccaccagcgcgtacttcttcttgcctatggtcagattggccaccatctgtcccagggcattgcccagagctccggccagggccgaagcgccgccgccccccggtaccggctcctttgaagataatacatccagaaactcctgaatcgtcatgctctctaccattgtaacatcctcctgtttttctatatatagtttttattatataacccatttacacaattttaactcccatcagcctggccagctcggcggcctgcagcaggctgacctttacacccgccagttccgtgaactgatccgagaccatgatgccgtcaatgacgcactctgataaatccattccctttaacggtgtacggaaaaaatccgtaccggccaggtccgtggaggaaaaaaccgtctttttaaatttcacctcagacatgaaggattcccggaaattacagccctttatttcgccgaactcccagaaggcagtagagaaattcccatagtggaactgactgtccagaagcttcacccacttaaacgtggagttgcagaactggcttccgtccccctttgagtctgatacattcacattcttccaataggtatcccggaaggagcagttagaaaaatcacacttgtcaaatactacattgcagaaggacgcgccgctgaaatcacactcctccatcctgcacctgacgaatttcaccgtgtcaaactccactttttttcccgatatcccaacgaccgtctggtcttcataaaccttatccaaaatcggacattcctgattggctgcttccgccatatcctctgacagcatatctcctccatggtgattttattttgcccattccctgcactgttttaaccttggctctgcatcaaagcccatatctgttcccatggacgcctccatctcacagggaaaatcaggacattctccgcagtggttcagcccttttgcctcgcagcaggatttaacaccgcactcaccgccccagaagggcttttccatggttgcgcatcccgtacagcggaccgcttcctttctttcacattgattgcagcagactccgcatcttgactcaaacatattcttcctcctttgttacagcctcctaaacctgttctttccctgacatctgttccacatccaggcgcagtacagcggttctcttaagcatagcttccgggtaatcccagctgtcctttcctgacatgtggcccatgatgcagttcaggccctttttcttttcctgtgtctcctccactacccggatgggtccttcccccaccacgcttcggtaccggaaggaatatccgcaggcctggtccgccgtcttaaggccatgggcagtgtccatctcaaaccctgcatacccggtctgcctgaccaaatccatcttcttcccctcggcagccccgtggaaatagagcgcattttcctcctcgtcgtatccgaagctgagaggtacaatgtaggcgctctttccatctggaaaagccagcctgcagcagtcgcactcccgtataatttcccttattccatatgtatccttaatttccctgtccttccttctcaccatattctccttatccgtgttctattccggcaaagcggtttcccggtgccgccatggttttgccataatgttgccatgattcccccacagcgccgccatggttccgtcacagttcaatatatgccctgcttccgcctgtcttgtccttcaccacaacaatctggtgctggattcgttccttcagctctcccacatgggaaatgatgcccaccagacgccttccctctgccaggtctcccagggacttcatggccaggttcagtgtatcctcatccagagacccgaatccctcatccacaaagagagtgtccaggcggattccgcctgcagctgactgtatctcatccgacaggcccagagccagggaaagggatgcctggaaggattccccgccggacaatgtctttacgctgcgctccgtaccattgtaatggtcgatgacatttaaccccagcccgttcttccccctgttatcctcctccgtacaccgtttcagctcatactggccgccgctcatgaccatgaacctggtatttgccctggcaatgatacgctcaaaatatgccatctgcgcatacgtttccagggtaattttttccttcccccccacttcacctgccgctgtatcggaaagggccttgacccatgtccattccttttgtatctcttccatggacgccttctgttccgaaatacgttcccttgccatgcggttggtttccagtctgtggtgaagcctgcttttttcctgctccaggccggtcagcctctcccttgcctcagactggcgaagccagttctcctgcatccgcgcctccaggcgttccatagcggttctaacgtccatgccgcccggaagcattgtgtccggcccattcaccgggtcccggtcctctcccacagactctcttcccacagtctcctctccggcaatctcctctcccgcagactctcttccctctgcgtccttctccgccatccggcctctcagcgcctccaatcgggcctgagcgtccgacactctgcggcttatccggttataggattcttccgcctccttaaacgccttttccagtccggccagaaatgccttcttctctgccagctccgcctgggcggccttcctgttctcatagggcagggaggactccatctccttaaggcggctttccagttccctttcctttgcctggctctctgccagcattttctgggcctgctgtttcaactccgaggctgcttccagggattgacgccctaagacccttctgccttcaatggcttccttatattcttttctcttcttcttttcctgaatcttctccttctgggcagcagcctggcgctccagctggccttttagctgccccatcatcagctcccactgttcaaggaaatacctgcgcccctgccgtacatcccctgtctttgcagccaacgccccggcatcggcttccgcctggcgaatccgctgctgccagtcctctttccaggtagccacctcggcatcaatctgctgtttcatcctttcatagcgggtatccagactgcctgccagtcttcctgcctccaggctcagcctggcagccgccttatccttttcctcggcagcagccttaagccggtctaccttgtccttggctgcctcttttccctcctccagataccgtgcaggcgccggatgagtgacagagccgcatacaggacagggctggccttctgtgagccgtgaagccaggattcccgcctggttgtccaggaatctctggtacatctcccggtaggcatcgtctgccctgcggctctcctcgcctgctgccctgtaacgctctctggctgcctccagcttcttcctctcctgcccgtactgccccagctcctctgccagaagtccgatgcgcccgctgtattcgcgcagtctctcccctgctgtcagggctgcctggtattcttctcctgcctggcgaaggctttccagtatcttctcatcgctgtcatttcgttccttccactgcctttcctccagggccacctgctccagccttttttcaaggctctctgtctctttcctgcatgccttcagattttcctgcagcccgtcaaaacggtcataggttttcaggttttcttccatcctggtaacagcgccaatcagcccgtctctgtcagcctggcgttccttttccctctcatacctgacctttgcctgttccagaaccggcatattttccctgagcacatccgcggcagccgccatatcccggtagaccgcggcatccccctgcattttccccagctccattccaagggcagccatctcgtccctgaccagggccatggctctgtccttcccctgctgctgcgcctcatccgccccaatcagctggtccagcacctccaaaagagcttccaggctcccctggggcacctccttccagcgcagcttaagttcctcactatggccctctgtgataacacctccggcatactgttccatgctctttctgctgtccgcgtagcggccatacagacccttggcccggtccttcagcttttcctgaaacaactggtagggctttgtcttgaatatttcccggaaaatgatgccccgatcctcggttctgcctgacaggagcctggaaaaactgccctgggccagcatggcaatctgggaaaactgctccctgttaaggcccagaagcccttccacctccaccgttaccgctttgtcccctgtaacgagcctgccgtccggcatatgaagctgtgcgtccggcttttcccgtgtctccccttcacctctttgctttgtcctcatatactcaggattgcgccgcaccctgtattcctttccactataggaaaatcccatctccacataggtcctggcatccggcctggcatatttgctgcgcagcatcctgggtttgcggctgtccccgctggcgttgccgtaaagggcaaatgcaatggcgtcaaacagggtggtcttgcctgctccggtgtcgcccgtaatgagataaagtccccggtcccccagggaggccatatccagggtgacctcacctgcatatggtccaaatgcggatattatcagttctgtgggcctcatctgcttccctcccatatctcttccatcagttttaccgcaaagtcagcctgctgctctgtcatgggctgattgttctgaagctggtacagctcctccatcagaacaatggggggcttgtccgcattggcggcagcttccaccaccctgccctccctggtgcgcttgttatcataatccagcttcatgacattgggataaatggagcgcagcttgcctattgcatccagtatatcctcctcatccgtaagggttatgtgaaggtaatcatccacagccgtaccctggtaaaaatcacggctggtcagttcttcatagcttcctctcagctcccgcatatcatggaggggcctgagaggacgggtattcacggtcacattccccttttccagcagctccaccacggtcactgacttcctgtggttcacctctgagaatgaatatttaaggggagtcccgctatagcgcagggtatcccttcccaccttctggggcccgtggatatgtcccatggccacataatcgaaggaatcgaacagttcagcactcacctggtccaggccgcctatggacagctcctccgagtcgcagcaggacgcaccggtgacaaactggtgggcaatcaggatattgcggccatcttcccctttcttatgttccgccatatgctccagagcccagcggaccgcatcttcaaaggtttcaatgccttcctccgggcagcaccttctcacaacagcaggttttataaagggcagcatatagacccgcaggcttccgtaccggtcctccagttgaaccggctccagatgaccgtcatacacaggcgccatataaactctcctgtccttcataagctgccctccaaaggccagccgctccgggctgtcgtggttcccgctgataacaaacacgggcaggttccggtccgccagcccggtcaggaaagcgtcaaagacctgtactgcctcagcaggaggcacaggtttatcataaacatccccggctatgagaacaccgtcaggcatttcctcctccgcaatcatgagaatctggtctaatatatatttttgatcctccagcatggaaaaaccattgacccgttttccgatatgaaggtctgataaatgaataaatttcatagttcttcctttcatgtacatctttaaccataataccacgagccgggcaccatttacaagaccatacggcccgtccttttccatgaggaccgccttattgaactatgaggactgccttattgaaagattggactggacctctgcctttcaaatatggtaaactagagcgtaaattcctgtttggaggtgagcatatgaatccaatgaatcttcttcagttaaaaccggcctggaaccagtttaaggccaaccatcccaaaatgctgtcatttgtgaaagccgcatccagggacggggtcatggacgaggggaccctgattgaaattaccgtcacatccagcaccggccagaccattgcttccaacatccgggtcaaaaaatccgacctggaattcttaggagcacttaaggatgcgctggaagattagatgcaaagggcgcccgccctgccttgcggcaggaggacgccctgttgattaatgggatattttgttcttcttcaccgtgtgtccagacattgcatgttcagacatgctctagttcaggttaataccggtaatggctgcctgtccatccacattgttgaaaataatgctgttttcctcgcccatgatgactcccgcgccaaactgctccagcgtgtctacatccgtatcagcaatttcctttaacagactctcagtgaaaatctggcccgcatccatctttaagaaagctgactcgtcggcaatctcctcaccctgtccttctccaagggaaacatagaccgggtaagcgcacaggcctgccaatgcctccatatccttatctgccaccgccttctgcaccttctctgcgaaaggcttaatctcactctgttccagctctgccccggcatgggacacgtcctctgcctcctccaagagtgcggcctcctgggaggcggattcggatgactgggattctgctgcggtttcagagtccgaagcagcgcctgcgtcctctgtctccccatccgtcatcccggctgtggtgtcggcctgtgttaccacctctgccgctgtagtggtcttggcatccttgcctgagcaggctgtgatggctgccgccgccataatggctgttcctaaaactgctaattttcttttcataattacgtctcctcatctatctgattttcagtatcattttctttatgtaaaagctgcatttccagagtccggtatgagcatgcacccctgtgaaatacgcatttcatccaccgcgtccggtgatacactctaacataaagagcctggctccttttgtcaaggcagccaggccaacattaatggttccgtaattaaacttaaaaaactgtttcaatccttttcctaaaatttcataatttaccatgcaacttttttggttttctttcattttgaaaccgtccattgagggctgttcattgctggcacttcattgtaaacagttcattccctgacaagggaaggacaaccgcctgccggtccgtcagcttctcagtgtggcccgcagacggtccggcttcagcagaaggtccagcccatcctcaatggagcgaaccaccacggatgcatggcttaacagggctgcgcacataccctcccgctccagaaccgctatggacagctgggctgcgtcaaacatctgtatatcattaaagccattgccaagacaggccacgcctccctcaagcccctttacgatttcttccttgcatccggcagcaccctcccgcggaaaagtccttacagttatgcccaaaggttcgcactggcgcgtcaccgtgccgtatgtatcagcagtgagcacatacacatgggccagctccttaagccgggcaatacgctccttgacccccttcagcagcatgccgtccactgccgctgtcccgttgtaatccaggaccacatggttgattctcaaaggcttccgcccgggtatttctattacaatcacagtctgtctcctccctgtatctcctgtcctgtatcttctatcccgtatcacttatccccatatccctgccggcccgaatccgtctatccgcagattccggcccaaatccgtttatccgtaaattcctgccagaaacgcccttgtctcctcttgcgccgggcacccgaacaattggcccgattccccccactctaccagacggccccctaaaagaaaggccccatagtcagatatcctgcgggcctgggctatgttatgggtgacaatgacaatggtatactgcttcttaagttctgtcagcatttcctcgattacggcagatgatttcacatccagggcggaacagggctcatccagcaatagtacttccgggtccactgtcagggcacgggcgatacagagcctctgctgctgtccgcctgaaagtttaagagcattcctgcccaaatcttccctgacctcgtcatacagtccggccatccggagtttttccttcaccagcgcttccagggaagccttatcccggacgccgtaatatctcggcgcatatgtcatgtttttatagatggaaaatggaaagggagccggcgtctgaaacaccagacccacacggcggcgaagcacatccttctgcatggattttatctcctgtccgtccaacaaaatccttccggatacagatacacccttttcctctgccagcaatccgttcatacaccgcagcagcgtggtttttccgcacccggacggaccgatgacggccgtaatccggcgggccggtatgtctaaggacaaatcagacaatacctccctgccgtcataggatgcgctgacattgtgaagcgtcatgatatgttccattttttctggctcctccttgcgtaaattgttgccaaaaggctgctgaataaaatcagcgccatcatgacaaaagcggtcccgtaagccgcgtccatggaagtggctccctgggccaccagcaggtaaagatgcataggcagggccatagccggggcggtgagccgggccgggaggccggaatacgccactgcccctgtgaatatgagaggggccgtggcccccatggcgtagcagcctcccagtattacgcccgacacgatctcccccttacaggccggcagcacaatcttccggatggtatagaacctggaacagcccagggcataggaggactgtaccagctgttttggcagctccctgaaggtcttctctgccctgacctctataaaaggaagaatcatcacagccagagccacaccagaggacaggatacagcgcccccaggccaggtcccgcaccaggaagctgtaagcaaacagtcccaggacaatggacgggattcccgaaatacactggattaccatacggattaatcccgctgtcctgcgtcctttgcagtaaaacaccataaagagtgctgtggcgacagcagggattcctcccagtacaatggctgtcgccgtaaaacacaggctccccacaatagcaggccagattccgccctcctcccccagtaccgctcccctgggcggctgagacaaaaattcccagctgattgtgcctgccccccggtaaaaaacatatccgaacaggaacaaaatgatgcctgtcaccaataacatgctggaatacgcccagaattttgtaagtgatgcgcgcagatgcatggttttccctcctttatgcctgttccgtcctatggccccggcctatggttccagcttatggttccggcctatggttccggcttatggttccggcctattgctccagtttacttcgcagcagggtgatgccggaattgataaggaacaataagagcatcagtaccagccccgccgcgtacagggcgtggtagtgggtgcttcccaccaccgctgttcccatctccagcgcaatcacagcggcaatgctctcactcttgcccagcagggagggaaacaggtttgcatttccaatgaccatcatcactgccatggtttcccccatggcccggccgatggccagaatcatggacagcagtatgttcttccacgacccaggaaggacaatggtggccaccatatgccacttggagatacccagggcatctgctgcgggctgataccgttctctcaccttcagcatggtctcactgcaggaggatatcagaaatggaagcagcataacggccagcaggattccggccgccagcacgcaggagcctgtgtggactccggccctgatgaaaagcctgaccataagggtcagccccatgaagccatatatcacggatgggattcctgctaaaaggtccacaaagggatataggattccccgcatccgctgggtggcaacgcaggaaagataaatggcggcccccacccccactgtcacagccaggaccattgccaccagagatacgtagagcgtagccgctatgaaattaaaaatgccaaaggacggctcccctgtgtaagcaataggcatccatctccggcccaacaggaaatcaggcactgccacttcatcgaacgtgggcagtgcctccttgacaataaagtatatgacaaaggccaggaccatcacggtcagggcggtcagggcctttatcagaactgaaaataatgcattcagctgtttattcattggtttgactccatttcaggggattctttcaagggaatatttccctgacaatctccccggcgttttcccggcgcagattaagcctcaggtgtaaaggcaggtatgtatccgttggcctccaccacgtcatatcctgtctgtgagaaaatgtagtcaataaatgcctgctcagacggggtaatctctgcaccggtaacaaacataaccggtctctggatggtatacgcaccgcttatgatgttttcagccgtggcttccactccgtccaccttcatggcagtcagtacctgtccgtctgcgttggccttattataagcgccgaatcccgcataaccgattccccatttgtctccggcaatgttggtggccagctctgtcatggacgctgactgagttgcggacgcagtcacctcgctgtcacccataacactcttctggaacacttcataagcgccgccggataaatcacggatatagacattgatggcctcagccggcagcgtggagtccacctggtcccaggtagcaatctcacctgcaaaaatctggcggatggtctcaacaggcatgtcgtccatgatgccgcagattggattctcagcattgaccgacacggtaagggcatcctttgccaccacgaaatcctggtaatgctctcccagggcttcaatctcagagtccttgatatccctggccagcataccgaaatcagcggtgccgtcaatggcagcgcttacgcccacgccggaaccgcccggtgccacgtaaacagagatattggaatccggaaacgatgaatccaccgcatcccaggtcacatacttctcagtaaaggatgatgccagggatgacagaatcggatacagggatgtggaaccgcagaacaggatggatgactggaactgcacggaagctgccccgtctgtttttgccccgggctccgtctcctctgcctcttttccggcagtctccttctcagatgccgcttcactggccgcagctgttgttgtctcagttgatgccgcattagagccgcaggcagtcagaaggctggctgccattgccatggatgtaactactgctataaactttttcatattttcctcccattgtcataaattccatatttgtacattttttgcaagtcaagaatagcacatatgacaaaagggctcaaattcaatttttctatgcatttccagtctgttattgctatcttctatgacacggcgctgccaagggacggccccaaaaagacaccggctgccccacaggactgccgcagcgaaaagccgccattcctacagcagagccctcaccaccgcctctgcggaccgttcctccacctgtatggtaagattggcttcattgatatgctccagataatgggcatccgaattgctgataatcctacactgctccagatacggattatcacgcttcagctgatgcagtttcttcaggtccctgacctccgctgtcttaaaacagctgtccggagggataaagcccagatttgcaatcaggctgttggctgccttatccacatgggccggaaacatgacgccgtcataggagcggaccagattccacagactgtcaaaggatatttccgttgcgttaatcagcaaattgggctctgaagcgcacacctggtcccggtcatcgtaaatctgctgttttccgaatatctcttccctgttaggaaatttgatcagtttaccataaacataggtatcaaaatcaagtgccttctccaacgtagggaaaaggcacactgcatggacttcctcggacgtattgatttccatgccgggcactgccagcacgccgtactctgcggccgcggccatgaaggccggacaattgcggcatgtgttatgatctgtaagggctaccacgtccaatccttttagagccgccatgcccgcaatgttggcaggcgtcatatcatcatccccgcagggcgacaggcaggaatggatatgcaggtcataagccaggttcatcatgacagcataccgtgaatcttaagggccgcttcaaagacaggcatatctgtggacagcaccgttatctcctggtcaagggccttcttcctggcggcgtcatccagaaccgctccttccgccagaatgacacaggccgtatctgtcagggcagacaccgccagtgtattcatgttggccatgacggtcacccaggcgcagcccgccggggcgcggcccatggcaatactcagcaggtcgcagcaaaacggaaccgtaatctgccggtccaggctgtcacccaggttcaccacgccgaatatctgtttgtcaatcaattcctgaactgtcataacatcctcctctgctctcaaagcgtcgtcatttccggaactccggcctgcggcgctttcactcttcatcctcgtccttcttatccagcacggacatctcatccgaaattctctgtatgtatcccttcaggatacgcagtgtctcctggcctccccggtctccgttatgcaggtcgtctgccagcacagccacttcctcggacagcttgtgcagattttcccgcagatagtaaacgcagtccgtctcattggcatcccccctgacaatatcctctgccagggccttacaggtaggcgctccgcaggaaccgcagtccagccccggaaactttttcatgaggcgctccacctggttcagcctggaaaagctctccatcatgttattgcccaggcggaatacgggctcatactggacgccggtcgtccatttaattacgttctcctcgctctcatgcatgtggctcctggccacaggcatgtacttgcgcaggcgtttcagtttaacctccgccacatagggattctccacagtcaggacaccgcccacacatccgccgttgcaggcgttcagctccacaaacctgagattggtaaacttctggtcctccatgtcctccagcacacgaatcacattctcaatgccgtccgctgccaggtagttttccgtaaaaagtccgctggcctctcctccgctgtgtccccagctgattccaattttccctgatgtaccgatgacaggataatcctctcccaccacggtcttcatacaggccagcagcttgggatacacgtccttgatagccagcacctggtcaatctcgctcttttccgttcccagaggtgactttacataggtcaccttggagggacagggggaaatgaacataatgccaatctcttccctcggaagccccgtgtcctccatggcctttctgacagccagaacagccgccacctccaccggaggattgatgggaaggagatggggaatcaggttggggaagcggacccgaatcagacgcaccacagacgggcatgccgtgctgataagaggcagctgctcctcatgctccgatatgtactgccttgtagcctcgctgaccagctccgcagcggcgctgacctcaaacacatcgtcaaagcccataagcagcagtgcattgagcacaatattcacatcgtccagattgttgaactggctgtacagggatggggccggaagcgccaccgtgtatttatacttcttcatcacatccagcttatcataggtcgcaagctttgcatggtgggggcaaacccgtatgcactcaccgcagtcaatgcagaatttgttattgatactggccttgccgccccgcacccggatggcctccgtaggacaccgtttgatacagttgatgcagcccttgcacagggattcatccagccttacggaatgataaaatttatccatcttaccacctcattctttcattctcgcattctacagattcaccaccatggtgatggtggtcccttcacctattctggtgtcaatatccatggaatcagagtacttcttcatattcggcagacccatgccggccccaaagcccagggaacggatttcatccggcgcagtagaatagcctgcctgcatggcaagcttcacatccggtatacccggccccacgtcggccagtatcattttaattttctccgtggttatctccacggtaatgacaccccctttggcatggattaccatgttgatttccccttcgtacatagctatggccacctttcggatggcgtcagggctcacgcccatctgtttcagttttcgcttcacatcgctgctggcttcacctgcccttgtgaagtcatctgccgatatgtcatatgttaatacaattgcttcctccataattggttcccttcattattaaatatattttctcccggtatcagccggaacacgctgagccattccgggacacactgaatcaaacaccaggagcatcagatagccccgccgtgcagcccagcctggtacagcataccgcaggcggagaacatacggtggcccgtttccatgaccacaaggccccggtccctggccatctccaacatggattcatctggtttctttcccctaacaaaaatgatacagacaatgtctaacatctccgcggtccggataacctgcggattgcacagacctgtcagaagtacggagtggtctttggaaaatgccagtacatcgctcatcatatctgaaccgcaggccgactttacctcccgatccaggaattcttctcctgccagcactctggcccctaatacatctcttacatccttaaccgtcatacccttgtctctcctcactatcattacttgtcaattgtacacatttccgtacattatagcataccatccattttgtgtgttttcaatataattccgtttttttacatgttttttatcgttagaattttcacattaatagtagattttttttcctatacgtgataaaatattgatacattgcacaatgtacaactagtgaggaggtaataaaaagatggcttgcaaaaaacaaactgttccctttaaggggacgcctgagcaggaagcagcgctgaaatcagcgattgccgagctgggtgaccagccgggcgcgctgatgccggttatgcagaaggcccaggaaatttatggttatcttcctatcgaagtgcagaccatgatatctgatgagatgggtattccgctggaaaaagtctacggagtatccacattttatgcccagttcgcgttacagcctaagggtaagtacaagatatctgtctgtctcggtaccgcatgttacgtaaaaggttccggtgaaatcttcaggaagctggaagaattgctgggcatcaccaatggtgagtgcacagcagatggcaaattctccctggactcctgccgatgcgttggcgcctgcggacttgcgcccgtcatgatgattaacggcgaggtatacggaaggcttactgtcgatgacataccaggcattttagccaagtacaactaagcctatgatgacagagatttccctaaatgtattggatgtatcggagaattccacacgggcaggcgcctcgcttgtgaccattctggtaaccgctgatacaagcgctgacaagctgaccattgtcatagctgacaacggatgcgggatgacccctgaacaggcagcccatgtaacggatcctttctttaccaccaggaccacccggaaggtcgggcttgggattccatttttcaaatatgccgcggaaagcaccggcggcagcttccatattgaatcggaaccaggtaagggaaccaccgtgacagcagtctttggactgtcccatatcgacaggatgcctttgggtgacatgaacgccaccatacacaacttgatcgtgtatcatcccgatacggattttctttatacctatacgtacaacgatgcatcattcaccctggacaccaggcagatgagggagattctgggaggaatcccgctcaacacccccgaagtgtccgcttacataatggaatatctgaaagaaaatcaacaggaaactgacggaggtgccctgatttaaaggggtatcgtcaaacatgacatgtatcgcacgtaagcgcctgaaagacaggcgccaggtgctcataacgagccactccactaggttcgtgaaacacctcaccaagtggagatgacatgtatcgcacgtaagcggccaaaagacggccgccaagtgctcataacgaggaggataatcgcacatgaaaactcttgctgaattacaggcaatcagagaaaagatgcagagccaggtcaatatgcgtgccgaagaccacgatcatatccgtgtggttgtaggtatggctacctgcggtatcgctgccggcgccaggccggttctgaatacgcttgctgacgaagtccagaaaagaggacttaccaataaaatttctgttacccagacaggctgtatcggcttatgccagtatgaacccattgtggaagttatggagcctggcaaggataagattacttatgtaaaaatgaatgccgacaaagccctggaagtggttgaacgccacttggttggcggccatcccgtggagaagtacaccatgggcgctgcaggtcttaaataaaggaggaaagtacgatgtatcgttcacacgtattagtctgcggtggtaccggatgtacttcttccggcagcccgaagattatggaagctttaaaatatgaaattaagcgtcagggactggaagaggaagtggctgttgtagagacaggctgccacggactctgtgccttaggccctatcatgattgtatatcccgatgccaccttctactccatggtgcaggtaaacgacattcctgagattgtttccgagcacctgttaaagggccgtgtggtgacacgtcttctgtaccaggagaccgtaagcccaaccggcggcatcaaggcgctgattgacactgacttttataaaaaacagcaccgtatcgccctgcgcaactgcggtgtcatcaatcctgaaaacattgaggaatacataggtacaggcggataccaggcactgggcaaggtgctcacggagatgactccggacgatgtaatccagacccttctggatgccggactcagaggccgcggcggcgcgggtttcccaaccggtcttaagtggaagctctgtaagcagaacgacgcagaccagaaatatgtgtgctgcaacgccgacgagggcgaccccggcgcattcatggaccgttctgtgctggaaggcgatcctcatgcccttctggaggcaatggctattgcggggtacgcaatcggatccaaccagggctatatttatgtccgcgccgagtaccccatcgctgtggagcgtctgaaaatagcaattcagcaggcccgtgaaatggaactcttaggcaaaaacattttcggaaccggctttgactttgacattgacctgcgcctgggtgcaggagctttcgtctgcggcgaggaaaccgctcttatgacctccatcgagggcaagcgcggcgagcccaggccaagacctccattccctgcacagaagggtctgttcggcaaaccaagtatcttaaataacgtagagacctacgcaaacattcctcagattatcctgaacggtcctgagtggtttgcttccatgggtactgagaagtccaaaggaaccaaggtattcgcactgggcggcaagattaacaacaccggtctggtggaggttcccatgggcaccaccctgcgcaccgttatagaagaaatcggcggaggaattccaaacggcaagaaattcaaggcagcacagaccggcggaccttccggcggatgtatccctgccgagcattttgatattcccattgactacgacaacctgatttccattggttccatgatgggttccggcggtctgattgttatggatgaagatgactgtatggtggacatcgctaaattcttcctggaattcaccgtggaggagtcctgcggcaagtgtaccgcatgccgtatcggaaccaagcgcatggtggaaatcctgaccaagattacaaaaggccaggctgtaatggaagacctggataagttagaggagctctgccactatgtaaaggccaactcactgtgcggcctgggccagacagctcccaaccctgtactctccacccttcatttcttccgcgacgagtacgaagcacacatcaaggaaaaacgctgtccggcaggtgtatgtaaggcgcttctctccttcaacatcgaccgtgacaagtgccgcggatgtacgctgtgtgcccgcaactgtcctgccggagcaatcgtgggctctgtcaagaatccgcatgtcattgaccagaacaagtgtatcaagtgcggcgcttgtatggaaaaatgtaaattcggcgctatctacaagaaataatgagggagggaatatacgatggagacaattaatcttaaaatcaacggcattgcagtcgaagctcccaagggttccacaatcctggaggcagcaagactggcacatatcgagattcctactctgtgtttcttaaaggaaatcaatgagatcggtgcctgccgtatctgtatagtagaattaaaaaacggaaagctggtaacttcctgtgtctatcccgccgaggaaggcatggaggtatataccaatacacctaaggttctggattccaggaaaaagacattacagctcctgttatccaaccacaaccgttcctgtctgtcctgtgtccgcagcggacactgcgagctccaggagctggcccatgagctgggcgtggacgatgagggatattatgacggcgagattaccccgtctgaaattgatacctctgccgcccacatgatccgcgacaacagcaaatgtatcctctgccgccgctgtgtggctgtctgcgagaacgtacagggcatcggcgtcatcggtgccaacaaccgcgggttctcaacctccattggttctgcctttgagatgggtctgggagaaacctcctgcgtatcctgcggacagtgtattgcagtatgtccaaccggagcactgaccgagaaggattacaccgcagatgtatttgcagccattgcagacccgaagaagcatgtaatcgttcagaccgctcccgctgtacgcgcaggactgggcgaggaattcgggcttcctatcggcacggatgtggaaggcaagatggccgcagccctgcgccgtctgggctttgacaaagtttttgacaccaatttctccgcagaccttaccatcatggaggaggcacacgaattcattgaccgtgtacagaacggaggcgtactgcctctcatcacctcctgctcacctggatgggttaaatactgcgagcactatttcccggacatgacagagaacctgtcgtcctgtaaatctcctcagcagatgtttggcgctattgccaagtcctactatgccgagaaggcaggaattgatccaaaggacatcgtaagtgtcagcgtaatgccatgtaccgccaagaagtttgagattggccgtgaggacgaggatgccaacggaatgccggatgtggatatctccatcaccaccagggagctggcccgcatgatcaaaaaggcaggtatcaaattcttagacctgccggatgaggaatttgacgcaccattgggccttggaaccggcgcagccgttatcttcggcgctacgggcggcgtaatggaagcagcactgagaactgccgtggaaaccctgaccggcgaagagctgcccaagccggacttcacagaagtccgcggcacaaagggaatcaaggaagccgcctataatgtggcaggcatggaagtaaagattgcggtagcctccggcctgggcaatgccagggagctgttaaataaggttaaatccggagaagccaactatcacttcatcgaaatcatgggatgcccaggcggctgtgtaaacggcggcggacagccccagcagcccggacacgtccgcaacaccacggatatccgcggcctgcgcgcaaaggtgctctatgatatagatacagccaacccaatccgtaagtcccatgagaatcctgctattaaggagctctacgccacttacctgggagagcccggaagcgagaaagctcaccacctgctccacaccacttatgtgaagaggagtattaaccagcactaagcaccataccgtaatccacatgtaataatcacgtatattccgtaaagacagattttcaatggtttttgcaagcaatgtacatatatgcaaaacagcggaccgcaggcttgcccctgcatccgctgttttgctacattccaggaggataccatgacagcacgtcagaaacggatttgggatttactggcagaacacgactgcctgacatcccaacagattgccgcccttctgcacatcagtgacaggacagttagaagcgatatcaaggaaatcaacggagagcacgcctctgaggtcatccgctccaaaaaaggacagggatacttccatagacgccggtcagcctgaaaagaacgtccccgcctcaaaacctcaacgtccggaagacgatctggaatgggccattatccggcaggttctattctgccgtgaaacgccctatctggaactggcggaagaactgttcatcagcgatacactgctctctaaaatcgtgtccgagctgaaccggaacataaccagacgacacagcctgcccgccatcctcaaacaaaacggcatcctctccctggctgcctcagaagaagaaaagcgttcctactacactctctatatcatgaaccggaatgttaaccattattttgacatggaactattccagcccttttttgacattgttgatttaaaggagctgaaggaacttatgttccgtgaactggacctgcttagccggcatctttatgacactactatcgtccgcctgataattgacactgccgtcatggccgaacgggctgtatgcggctttttcatgcctgaaatgccttctgtcacgcccgaaacgccctatggcaaatcatccgaagaaggcgccataaacacaggcagacactttttagaagaactgggttcccggctttttatttcctttcccccatcagaatatgagtatttttcccggctcttccaaaatgatttctattatgttagggagcagccagacagccaggctgaaagcctgctggagaaaatactaatagaaatcaatgtggaatatggctttgacttcactgttgacaagaacttctgccacgaaatgacagaacagctccacggagccctggaacggagacggcacaggcagcatgtcatcaatcctgtcctatccactatcaagtccaaatatcccttagaatatgatattgccatcttttttgcagaccgttttaaaaatctttcaggcatatccctgagcgaagacgaaatcagcctgtttgccatccacttcataagggccatggagacaaatctcggaaggacagagcaaagggtggggctgattaatccatacggaaaacagattaaggagctcatggtcaagcgcctgggggatatgggagagtgccgttttcagattgcctatacctggtctgtctttgattatccccatgaaatgcccaaggatatcctggctgtcctcaccacagttcccctgcccgtccagcccgcagatgtaccggtaatcctgtgcaggaacttcctgaactatcatgagaaggaaaaactgctcaccgttgtcagggacagcgaggtcaacagcatacgaacctattttaggacgctgttcaaaccgtccctgttcttcaccgacatggagttcgattcccgccggagcgccgttgcctttctgtgcggaaaactcagggaacagggctatgtgggacccggcttcctggaaagcgtcatgcagcgcgaatccattgctcccactgcctttgagccgggtttcgcctttgcccatgccatggaaaacaacgcgaaacggaccgcggtctgtgtatgtgtgctgaaaaacaagcttccctggggcgaatacaatgtgaagatcatctttctttttgccctggcgccaacctggaaccataccattattcccatctataatgtgatgattgataatctgtttaagaccaataccatctacaaactggcaaagatcagggattgccggcagtttatggatttgttgatttaacagagcagatataaagcggtaacagcctggcgggcaatgtgtctgacccgccaggctgttattttcattgaagcgtatttatattttaccttatttattgctttcttctcctgcctgcatatagctcacatccccacatgccttcagttcatataggccgtccttataagtcaggaccgtcacactgcaatttgcaatgcgttccccctgatactgctcaggcaccagcaaatctaaaatagtggcaatctcatcgccgctggaaactgccagggcatttccgccgcctgcctcctgggttgcttttacaatggtgtccataacctcaatggaacgctttgagatgtcatcataggtctccgccatatgcagaggatcaatggcagcgattgtatccaccttttctttctttgacagctccagataggttgatcccttctcgtcataggaagccccgttggcttcgtatatcggacgccacaattcctcgtccggttttccctcaaagccgccgtaaaactcttcccttaacccgatgacttcctgcaattcagggatatccccttgattctgagccagaatatgctttgctgttgcccgctgtcttcctaaatcgccggaaaacgcagtggtaaatacaatatccttcatgccctttccggccgcgtcagcctgggattccccttcctctgtaagaggtgaatccgcccatccctgtacctgtcctgtggtgttaaaaaaagtctttccatgccgtaccaaataaattgtgacatccttcttctccggcgctcctgacggttctgctgcttgttctactgccccttgtaccaccggttccgtattagcctgcctttgacagccagccaaagccaccacccccaaaatcatagcacctcctaaacatagcttccttatcttcatattcatacccctcccccattttaagctctgcttttgtacatctccaccatttcctttgccagagccaatgtaatttcagcccccatcataatatcctcgctgtgaatcatgataagtcctattttatccaactccccgctggcatccatagtaatcagtctggtatgtacatggtgggcctctttcatcttctccccggcagccgccagatgctccccggcctcgtcaaacctgctgtttctggcagcggccagggcagccatggactcgctcctggcctctcccgcattgctgataatctgcaggcatatcagttccatatcctccatcacgcttcccccaattctttcttaacctgatttaataccttctctccattcattgtaccgtatgacacaggatcaatgcttgtcaccggacaggccacctgcttctttacggtctccatctggaatcgcacctgggggcctaagagaatcaggtcggcctcagctccaactgcttccgcgtcggaaacaggggcagccgaaatctcacatgcaaagtcctgcgcctctgctgctgctttcattttcttcacaaggattccggtggataaaccgccattgcacaataatacgattcgtttcatatttttaaatcctccttcttttgattgatattatatttatagtttaaatgtcctcttccccgctctccagcttaaccagattcttctcataaatcttaaagaatgggaaatacaccaacccgtcaaccacaatcagcaccaggataagcagcggcgctttccagtccatggttgagaaaaatgctccgatgacagaaggcatctgccaggacagcatggcaaagctctttccaatcaggccaacctgcatggtcagatacgcagccgtaccgttgatgaccgaggtcagcaggaagggaacaaaaaataccggattcagcataaggggcagaccaaaaataacaggttccgagatattgaaaaatgcaggcacaattcccagccttccaatggtctttaactgttttgattttgaaaaacacagcagtgccgtcaatgccagcacggatccgcatcctccaatcaccacaaaatatacccagaagggcgtggtaaatatggatggaagggcctgcccggctgcatgggcagccgcgtttatggataaattgccgtcgcggataggcgcaagcacacctgaaagggcagcgtcatggataccgaagaaccagaaaatatgtaccatcagtgttatgataatggtaaaaccaacactgtccgctgctgtcagggacggggaaatggcattgtatatcagctttggcagcgtggttcctgccttattcattatggcgtacaatgctatataaattaccatcagcaccgcccccggcacgatggaggcaaatacatcggaaagggaagctggcaccgtatctggcagggaaatttttccaaaatcccgttttctcatgtaacaatataaatccgcggtcagaatagatatgaacatggccggaatcaatcccttgccgtccatataggacagctccgccatttttccatcccatcccagggacatgggctccacaataagcatcagaaagccgcagacacctaaaagaataggcagaaacgactctatcttccggctcttgcacaggaaatgaatgattccgatgcagatataaagggacatggcccccaaggtcagtgcgttaatccaggagaaaatcatgctgttgctctccacaaacctggcccaggccagggtgattcctgttccggccgcgtccacggagggagcagagctcagtacagctgcaatacctcctgtaaaggtgatgggcagaagggacataaaggcgtcccggattgcccgcaggtgtatctcattccccagcttgttggcaagaggcataacatatttttccattgaaacgctcatactctgtatattcatataacactcccccattattttcctgtgatatgttttccatccgtttcaattacatccttgtaccagtaatagctctttttcggtctccgctccaggccgttttcataatcaatggcaaccaggccatagcgcttctcagttccgtttttccaggaatacaaatcaaacggcgaccaggcatagtacccccgcacatcacagcctccctctttggcttttaacaccgccgcaatatgcatgtccataaactcaatcctgtcatcatcctccacctggttcactgatgtgtcctcatagagtccgataccattttccgtaatatagatgggcagatggtatttattccatacctgtcgtattccctcatacagcacctcgggaaatatctcagtatcccactcagtatagcggctgctctccggccgtacctgctcaaaccagcccttaataatggtctgcgaggttccctttgccttctttccctggttattgacaatcagggttgtctccccgctctcataaggtttcaccatgaccctggcatagtagttcagcccaagatagtccaccctgttccggcggatgacggccaagtcctccggagtcatcatggacaggtcgcaggtctttttaagctctcccagcaaatctcccggaatctccccaatggctgccgtatccaatatccagttattatagaaattatcggcaaatctcctggctatggctgattccacgcttgtgtccgtggtatagacaggagaaaagctgtgcacaattccaatctgtccgtcatatccgcccgtcctgaacgcctccacagccatggccgaggccagcatcatatagtaggatgcagtgacagtctcctggatgtcctgatgtcccggaggataattgccaatcagataaccgctgttggtataatatcttggttcattaaaggttgcccacagctttacccggtccccaaaccgttcaaagcataccttcgcatagtgggtgtaggccacacacgtatcacggttcagccatcctcctttttcctccaggtattgtggcaggtcccagtgaaaaatagttaccatgggtgtgattccatattccagacaggcgtcgatgagccggttgtaaaaatcaatgccctcctggttcacttccccttccctgtttttgataattctgggccaggccagtgaaaagcggtagctgttctgtcccccttccttcatcatgcggatgtcttccctgaagcggtggtaatggtcgctggccacgtccccgttttccagatggttttcgtgcaaatacacatcccacatggattccactcttccgccttcctgccagcctccctcacattggtaggaggccgttgctcctccccataaaaaatcgttcacgtttaatccctcctgtcttttatgaactcattataacaagccaggataaaaagataaaatttgatttttccgctgcataaaggaaaaaacgagggaaaataacgggtacagaattcaggcagaacaaaatattggcagaacaaagcctgggcggaaaataaaagaagcggatgcaatggcctctcctgcatccgcttccggctgaatcactgattcaacccctgtttttttatactattgtcttctaaaccacggtctcgctcctgccgttttctcatcctgtcgtgctcccagggcttaaaaacgcggtccaaagccaggcatatgacgccaaccgtcagaagcaggtaaacccatacactccgtacaccgtgttccgccagtctccacacaatgaagatgcacacaaatgccaggggaaacaggcagcgtctcaacatctcactcttcagccaatggttcatatgcttcctgctcattcaaataccgtctgctcttcaatatccgtggacaatgcttccagcgcctttttaacaatgcgcctcctcacctgaagctcatcctcttttggaaggcccggatttcccacaggataaggaattcccactgcgggtatgattctgtttgctcctactgccatggagatgggtacaatggaacagatatgtacaaccggaattccaaaactctctattgtcttagccatcgttgcgccgcaacgagtacaggtccctcagttggatgtgaggattgccgcctgcacttcattacgtatcatatcctgggcaatctcctcagcaaatctcttggcgctgctgaccgcagtggtattgccaaccgtactgtagtagcgtccgtagagttccccgattcccccgtcccgctcaatctccctgcatacatccaggggcaggacacggttcggatcctctgttgcatataccggatcatatcccccatggacagtcataaagccttcactggtcagacggtccagattctctatgtcgtagatgccatatatgccggcattggcggacgggatatggtccggatttccctgaggtacaatgccgccggatgtaatcagcgcaatccttgcatgagccatatctttcacagcaggggcaggctttacacggtcaaatacaggcatgggaagctcggtgacatacggttccccccgcagcttcttgatcatcatgtccactgcccgctctgctccgttcttttttgtatgcacattcacacggaatccctgggcaatatatccctcttcctctggaaatccgatttccccgccttcaagcagtttttccgccagcgttcccatgacaggcagcgcctgacgcatacctgcggcagagatggatgtttccacaatatatatcttactgcaaaacatttcagcccccggattctccgggtacaatgcggtcagaaccggaatggaaaggcgtttcttaacctcagcgcagatagttgcgcaggccaggccatagcgccccgcattgaaccccggacccgctataaacatatccggcgccagtccctctgtcatggtcagtattgtttccagtgcgtcttcctggtgatccgcaaaatagttgtccccgcagataatagtggccacaatctcagccttttcccccagaacagcctgcagacctgtgccaggtcccacaatgccttcccgcaggattggttcctgatcggcaaattcctctccgccaatctgaccataaaactgattcagataatgtacaattctcttcatatggtttctcctctaccgcaaacgtgttgtcatatgctcatagcccatctcgcagcatgagcccatgatagccgcaatctccaccgaaacagttccgtcctcaccgatgctgtccacatttcctcctgtgatgatgcggacagtctctatatctccaatcacccgttccatctttggcagtaccacaaactgattgccgtttccatttgttaccacagcatctgcctccggggtcacatccgccagtccctgggatgctccgtcacgcccgcagtactcatccgtaaccaaaacggtcttgattcccttattctcatggagtctgcagttgaacatcaaatctgtttcaggattaccgccgccttcctcgctgacaatcacaccatccacgcctaacagttgggacaggctgctggtataatacgccgcccgtttcttttctttcagcatggcgctctcattgctcagcagaacgcccacaaagcacagctccttcccatgcctgcgcagcaaatccagtatgatgggattattctcatgatggatggtggcattcttatgtccgggagcagcgcagtttccgcttataatagctccatccagcacctccaggggaccaatcatagtggaaaggattcctttcacattgaggccatatacatacgtatcatgcatcaatccctggcactgtaccatgtccacatatacaaccttgggcagatgcggatacttctgtcccatttccaggatgctctcatgttcaaatacttccttctcatccggttccagccccagggttgtcttagccatatacgcagccgtcttaagacctgcgatgcggaccgtggcttcgtgggtatgcttgtccaggccttccaccgggtatatcagcggtaccagtatgttcatctttgaaaaactgttaaattccgctcccggcccggacatatcaatgatgccttcctggaatgccacaatttttcctgaggtggcaaccgcgcaatcttccagcacattcgtttccccatttccaaccgtttccacatctcctacaaatccgggaaatacctgtcctgagccgctctgcttgaagcggggctgaaccacatccttgatgggaacgattctcacagactcccccggccttgctatatcaaaatccacactgcggatattggtatcttccatgagatactcagccaattctgctttatttatgtataagacaccgctgcaaaagctgcttgcttctgcaaattggatgtcctgcacatgaaatttattcagtgtcagtttcattatgtttcctccaatatcagtttatttgcccatttcctccacttccagcgcccgctcaatgatggataaatcaatgagctgaaaatcttcccgggctgcctttccccattttttgtaaacagctatatccctcagcctgtacaaatcctcagcatagcgaatggccttcccaatcagggtcactgattccatatcaatggtccccgccgtccccgacagcagaaccgtcttatagggtgtgatatccggccggatgcttcctgtcagcggatgcgtaagaagacggtatccgcaattcaccttctgaaaaaccactctgaacagttccaacacatctgtctcgtaatactccaggtctgtgaaaccgcggtctataagcattggattattggtaatacaacggaatgggtgacccatgtctggttcctccttgtaaacagcgttatttggcttctgccttcagatttttcacaagctccacagcgtcttccccatataattcagtcagttcaggccatacagactcccagcatttgttatagaaattctgaagctcatcatctgtaaattcaataatcttgacgccatagtcttccagtttcttctcatactccgcggtttccttgggcgctacctcccacctgtcatcttccagtttattggccgcggtctgcaaagcgtcctgctgctcggttgtcatctcattccatttgtccagattgatatacaggtaccaaacctcaaaatgatcattgtatggcagatagtaggtcgccacatcccggtagctgctgtaatatccttctgctccggatccaatcattccgtcaatgaccccggtctgcagggcggtaaagcagtcgttaagggccattggggttgcattgtagcccagcatgtttgtcaccagttccgcacccttcatggtctggcagcggaccttatagccctcccttacatccagatttgccggctgatttggttccttattcaggattgcgccgccaaagtacagaggataaactgacagcagtttaatgttctgatcttccagatgtgtccggatggtttccgtaaattcactgtcacggctgaaaattgcctttgcttcatcccaggtagcgcatatatagggagcacttgtgattcccaggtatttatccacagtggagctgagggtggccatctgcatctccacatctcccacacttaccagctcctggactgctgtataatctcccagctgcgcagcgggatataccaccacctccagggaatcgtcagccgccttaacgttatccgcaaattccttggcattgatatccgccggtgacccctctgcccggtagtggctgagtttcaatgaaaatgattttttctcagcggccttgcccgcgctttccgtcttgccggaaccgccgcatgctgtcatgcctaataccattgccgcaacaatcgctatagaaagtcctcttttaatatttttcatagtattctccttttttatggtaagaaatcattttcttatacagcaaaaccagccattctcggaatcgcaagggccaaatccggccaataggtgacgagaaatacaatgggtacataccccagtatcaaaaatgtcatggtgggcttcagaatctcatggaattcagcctttcctatcctcattcccagataaaggatacttgcgtatgggggcgtaactccgcccatggcaagattcacacccataatagaggcaaagtgaatggggctgattcccagctgattcataacaggcataagcaggggcgcgcatatcaaaacgcccgtggtgtcatttactatcattcctacaataaacagaaagatgtcaatgatgaacagcagtatatatttattggtggtaatgctcatcagaagttctaaaaccagctcagggacacgatacacggtaaacacgcggctcagcatcaggcagcatacaatcatgaccataatggatccaactgtactggtagcctcttttgtcattgccaggaaccccttaaatgtgcaggccttatacacccacaatccaatgggaatggaatagatggctgccatggctgccgcctcggtgggagtaaagacacccccataaattcctcccagtatgatgaggggcataataagggccggtacagccttaaaggtcatttttccggcgtttgacgcaaattccccaaaaggtttcttttccgttactttcaaatcaaactggcggctccagaatacatgtatgatgcaaaataacgccgtaatgataagccccggaccaagagtggataaaaagcaggcaagaatcgagcattccgtcacccatccaaacataatcataacaacgctgggaggaatcagaagccccagaacagaggatacagttaccagtgctgtcgcatatcccctggggtagccctgttcttccatcttaggaatcatgatggggccggtagctgccacgcccgtaaatccgcttcctgatatggctcccataatggcgcacacaagaacagccaccacgcccaggccggatttgatgtgacccacaaatgcgtctacacagtccagcaagcgttttgctatcccgctgccgcccatatacgttcctgccaggatgaataggggactggccaggagcacggttcccgtggactgtgaaaatacccaaatcagcatggtcttcatggatacgtcgccaaagaggctcaaaaacagcaatgcgccggcaaagcagaccggaagggggatgctcagcatcagaagaaaaaccagcaatattacatccataagtatgattgacagagaagtcataggttttcacctccttcccttgcttcatccttgtttttcatttgaccaatcaaagcccggtaggccatatatacatcccttaccgcataaataaacatcagcacaaatcctacggtaagcgctatattcgcaaaaaacagaggggcgtatgtaatgtcagccagcttccaggttttcagggaataggaaaagaaatagaatccccagtaacaaatccaggcaagaataatgatacacaatgtacgtttgattgcatcaaaaatcagttttgagcgttccttcttgatataaagggtcaggattccacactcaatatggcttttctcataggaagcattggcgccgcccagcatgtaaagccatataataggaaatagcatcaattcctcaatgcccatcagtgatgatttcagtacgtatcgcgcgaatacctcgtagcctatcatgagcaataacatgagagcagccacaattgacgcgccatactgcacttggatcagtgtttttcccagcttcttcatacatttcctcctcttatagtttttttaaatgatgtaaattcatatcatttacgatacctatattctatatgatatgtctaatattgtcaactatataacgatatttttttgattaatcgttaagttataccgataattgcaggattatccccctccccatcgtatttttagcagcaatttacagcaaattacttttcttcttacgccccgaaatatatatctatttagatatgtatttagatatacaaacagtccaaaaacctgatattgcttgaaacgcattcaaatcaatgatataatattcaaaatattacctatgaagggaggttatccccttgtccaatacctcttttaatcaaaaaggagtttctctttactatcaggtagagacttatatccggacaaaaatcgaatcaggtgagtggccttctggatttaagcttcccacagaaacagaattatgccagtattttggggtcagccgcactaccatacgccaggctgtaaataaaatggtagagggcggccttttaatgcgcaaacagggttcgggcacatacgtcacacagcccgcttattccaggaacagactttccacgcagcccagtgattctgtgtgcaaatatatttatatgcccattcttcaggatgacatggagcattcctaccagaaccttctgctgacccacatcagccatatactgatgctgtgcgagcaaaagctgatatcccaggaagacggaaaaaatgccctggatttcattgtccccctgatggatatgcatccccagaccattggctttaatccgcttaacgaggattatttcttaaattttgaacaatatctgatttcccatctgggaatcgatctggccggaaaaatatataccggcagaagccgcaacgatatgactccaactgtaatgcgaatgagcatccgtgacagcatgcttgcggtttacgagcggcttctggcactgatacgccgcttgctggctcttgccgaagaaaatcagggacgtatcatcacagggtatacccactgcatgccggcccagcccataaccctggaccattatttcctggctatagcagaagccctggtgcgggatatggacaggctgctgtctgcttaccagaacctgaaccgttccccccttggagcctgtgccatggccggaacttcctttcccatcaaccgtgaatacaccgcccagcttctgggctttgacggcattataaccaacacgctggacgcggtggccaccagggattatcttttggagcttgccgctgatttttccaccctgggatccaccctgtcgcgctttgcccaggatttgtacctctggtccacagcagaatttaactatgtaagcttttccgatgcttattcctgctgcagcagcatcatgccccagaaaaaaaatcctctgtcaatcgaacacataaagagcaaatcctcccacctgaccagcacttatctggatattgcaatgtgcctgaagggaaccagctatggtcattgcagggacctttttgaatgtatgcccccattctgggatgcggtggaacaggtcaccggaatgctggaattgtccatcggaaccctgcaggacatcaccttccactacgaccggatggaatttacagccagcatgaatgactccatattgacggatatggcggattttctggtgcaaaaggaccgcataccgttccgcagcgcccacaatatcatcgcctcagccgtccgggcccagggtgataatcccagcagcaaaatcaccttaaagcagctcaacaaaagcagcaaacagcatctgggccatgacaccacgctgacagaatcagaatgggcatccttacagtcaccgcgcagctccgtggcaaacaaacgcagtgaaggttcccccgcccaaagctcctgccggaaaatgctgctgtccctgcgcatggccgccgaccgctgcaatgaacagtacaataaaatcatcaactccctgcagctggccgagcaattcagaaaggaacagatcgatgtgctgaaaaatgggacgcattttgagcataattaatttctatcagtttttatgagtcctatatatgcgaacagcggactccgggattatgtcccgggtccgctgttttgttctgcgctctgttttactctgcactctgttttactctgcactctgttttactctgcactctgttttactctgcactctgttttactctgcactctgttttactctgcactctgttttactctgcactccgttttactctgcgctctgttttgcactgcactctgatgcatagtgcatcctgtcatatgtcagaacacttcctgcttcaaacgcctccactaaatatcccatccgatgtcccctgcccgcagcccatcagactcccaggcttttaaacatcttgtcgctgtattccttgttcctcgccccgctccattccttttttctctccatcctcaaaaagcatctgtcccagtattgtcattcctatcttctcctttacatccattagctggttccgatccaaaaatttaactgccaatgcgtacagcacggactgcattctcttgacgtcctcttccttcatatccaatcccggactctccagtatatccatgcagcggcagatgcgttcgctgatttccatagtgcctgacatcaaaggcgtcaaaagaagcgaaaatacatcgcagcgtttcagccgttttttctttctgatttttcgctctgatttttggaatactttatctgcacgcccgtccttcagacgtatgggctcaatgcggtatatgctgtttccgttcatccgttcccgtttcagcacctttacatttgatgtacacagtgctaatgttgcaaccggcacattgtaaatcatgcctatatatgcctcgtactcacgaaaacgccgcaaatcacgttccgttatgctgtcactctcaaattccagatgtattcatgatccacccatacagcctcctgttccggcaaaccatacaggaacctgcctccattatacttaatgtcaccctgccagacaaggacgccctgcctgatatcatacaatttatagttacttattttacttgattcgttggatttcacacccggtacagcgggaagatttttacatagatactacgtaatttgatttttgcagaattctgttatcagaacttagatttttattcttatacaattatggcggaggtccctcatatgcgttcacgccccggcgtctgttttttaatatagcatgtcagtgcgcctattgcaatctcaaaatagaaactcatccatacccccagccgcaaaaaacttcatttccaaacagcagcggccgggaaatgaatcacatggtttcccggccgcaggctgctctttacttaaactccaacctcaaagtccaatccttccctccggccattcatccgctaaaccagctggttatattttccccgcttcacatagtgggtatgcagcagatgatgggacaaatgtccattgggttcacccagatattcgctgtagagcttcatcagatcagggttctcatgggatttgcgcagcaccttgcgctcatcctcactgtagagagcgtttgaacgtttttcacggtaattctcttccgtgcatcttggctgtccgccgccgtttatgcagcctcccggacatcccattacctctatgaaatgatagggcgatgtgcctgccgccacctcatccataagcatggaggcgccttccagtccgctggttaccgccacattcacagttactccctttaaatgttcgtatgcaggaagcgtatcctcaattgtgatggaggctgtctttacctgctccaatcccactataggcgccacatgcagcttgtcaaagggaagttcctttccggtcaccacttcgtataccgtacgcagggctgcttccataacgcctccggttacgccaaatatatcagctgctcctgttcccagtcccagaggcgcgtcaaactcaccctccggaagattcacaaaatcaatgcctgccgtcttaatcatacgggccagctccctggtggtcagtacggcgtccacatcgcggttgccgtccacttccatttccgggcgctgtatttcatacttcttggctgtacagggcatgacagataccacaaacatgttttccggcgcggttgcggtgcgctctgcatagaaggatttcaccacggcgcccagcatggtatggggactcttgcaggtggacagatggtctaactcctccgggaactgatgctcaatatgcttgatccagccaggagaacagctggtaatcataggaagtaccgccttttccttttgggactcatcccccttcagagctgcgttcaggcggcctaaaagttcagttccctcctccaatatagtaaggtcggcggaaaacagggtgtcaaacacatcgtcaaacccgatttcgtgaagagccgttgccattttcccggtgacaggggttcccaccggcaggccgaactcttcacccagggcagccctcactgccggggccacctggaccaccactctcttttcagggtcagccagcgcccgccacaccggtgcaaggccgtctgtctccttcaaggctccggtggggcagaccacagtacactggccgcacatggcgcaggctgtggagttaagaggcagccccatggccgggcttaccaccgtatcaaatccgcggttctgggcctggatcgctcccaccttctgaatctgggtacacacagtgacacacctccggcagagaacgcatttgctggtatcccttgtgatggacggggaaatatccaccatgggcttggtcatggctccctcaaaccggctctcgctgactcccagctcatagcccagctcctgaagctcacagttagtattcctgctgcagttgagacaatcctttggatgattggacagcagcagctcatacagtacctttctggcagccagcaccttgggagaatgggttcttatgaccattccctcccttaccttagccatgcaggaggcctgaaggttcttcattccctccacttccacaacacagatacggcaggagccgtactgatggacattcttcatatggcacagactgggaatcctgattcccactgtctcagccgcttccataatggtggagccctctgaaacctccaccggttttccatttatcgttacatgtatcataatctacctcctatctcctgtcgcagtgcaggcacctgagagcctcgcccatggcatccagcttgtggaatccgcagttcacttccctgaaattgtccttgcgctcctccacagacagacacctggtcgggaaacgcttatgaggttcattgacttcaatatccgctatctcaggtatatcaaaccactcgcccatattcagctcgcccttgcctccaaggtactgatcaatcttcatggcagctttcttgccgtccgcaatggcgtgaatcacaacattggcgccccatggacttacatcgcctcctgcaaacacgcctgactctcctgtctcagatgtaaacctgccgatatccagcttaccgttcttagccacctccacatgagtggtgcggtaaacctgatgatccacatcctggttgatggctgtaacgatgccgtcgcactccaggaaaaagtcagaatccggaatatgggccgtgcgcctgcgcccgtcgcttccataatcagtctctttcctgcggaccagatgaatgcctgtcaccttaccttctgctcccagaaattccaccggtgacgccatggcgatcagcttcacgccttcttccctggcctcgatgatttcatcctttccggcaggcatctccttctcagacctgcggtaaattacagtcacttcggaggttcccagacgcactgcggtcctggccacgtccatggccgtgctgccgccgccgattaccaccagcttgttgggcacggacatatccttcttaaggccgatgcgctttaagaatccaagcccgctttccacacccttaaggtcctcgcccggcacatcaagcagcctggatacctgggttccggaagcaatgtacactgcgtccgactgtttcttcatatcctcaaaggtaatgtcagatcctatcctggtattcaggtgaatctgcacaccgctcctctcaatggcatgaatctccttctgcagcacggcctttggcagacggtactccggaatgccccagtacagaacgccccctgccacggactccgactcatacacatgtacctcatggcccatattcgccagatagtaagcgcatgtaaggcctgaaggacctgctccgataacggatatacgttttccggtagccggtctgggttcaaccagaggcacattgtactcatcccgcagcgcataatctccgatgaaacgcttcacgctgcagatagccagaggctcatccacctgggcgcgccggcaatggtcctcgcatggatgggtacagacacgtccgcacactgccgggaacgggttatcctgccgaatcaggcggtacgcgtcctctgttctgccggctgccagcagggacatatatccgggtataaatacattggcaggacatgcattgcggcagggtgaggtctgaagctcggcgcagacgcctgcgctgcaatgcttctcatagatgtgggcctcgtattcgctgcggaaatatttaagggtggacaggacaggattgggcgctgtctgtcccaggccgcacatggctgtctgctgaatggttccggccagctcctccagaagctccaggtcctcaggctgcccctttccctcggtgatgcgctccagtatttccagcattcttctggtgccgttgcggcagggaaggcatttaccgcaggattcatcgcagataaagtccatgaaataccgcgctgtatccaccatacaggtatcctcattcatgacaatgagtccgccggaacccatgattgcccccaggctggacagggattcataatccacaggcgtgttcagatgtgtcttggtcagacatccgccggagggaccgccggactgaatggccttgaattttttgcccccaatgattccgccgccaatcttgtatatgatatctcccagaatcgtacccatgggaacctcgataatacctgcattgacaatatctcccgccagggcaaatacctttgtgcccgcgctcttttccgtgccgaatcccctgtaccactgtgagccgttcagaataatgggcgctgcatttgccagggtttccacattgttaatgatggtgggactttcaaacaagcccttttcaaaggggaacggcggcttctgccttggctctcccctttttccctcgatggacgccagaagggaggtttcctcgccgcagacaaaggcgcctgcgccgatacggatttccaggtcaaaggaaaaaccgcttcccatcacattccctcccagaatgcccgctttcctggcctggtcaatggcattgcccagccgctccactgctatgggatactctgccctcacatatacataacccttggaggctcctatggcatatcctcctaacatcatgccctcgataatgctgtgcgggtcgccctccaggatgcttctgtccataaatgcgccgggatccccctcatccgcattgcagaccatgaatttgcgtccgtcctcagacacagccttcatacctgcttcccacttcactccggtagggaatccggcgccgccgcgccctctgaggccggcagccttcatctcttccaccacctgggccggcgtcatctccgacagtgctcttgccagggcgccgtatccgtccctggatatgtatgcctccagggaagcatactccatgtgtccgcagtttctcagcgccacacgtacctggcccttgaagaacggaatatcctccatcctcggcacatggactccctcgtcctcgtcaaaatatgtatattcctcgcacacctcatccttcagaagatgcctggccaccacgtcctctgccttttcaggattcatctttgtgtagaagattccctccggctcaaccaggatgacgggacccatggcgcatgtacccatacatccggtgaccatgaccttaacctcatcatccagcttatatgtactcactgactttataagcgcatcccttacttccccgcagttagaggatatgcaccctgctccgccgcacaccagcacctgacgccggtaggacttttgccgtctcagatattcttcttttatgcttaataaatcatcacggttttttactgcatccattactcctgcccctcctcttcatagtagcgttccagaatctgttccagtttgtcaggatttacctgtttgtaaacctggtcgtcaattgacatggccggagccagaccgcaggccccgatacatctggccacctcaaaggtaaaccttctgtccgccgtggtctcacctatttccacatccagcagttcctttaaccgctctacgattttcttcccgccccttacatagcaggccgtccccagacagacacgtatggtgtgttctcctctgggctgggtagaaaagaaagaataaaacgtcactacccccgatacctctgccagactgatatccagagcgtctgctatgaccttctggacctccagaggcagataaccatatattccctgcgccatatgaaggacctgtatcagacttccctctttccccctgtactctgccgccaactcgccaatccgctttaacagcgcttcttcactgtggtcacagcagcatgcatgtgtgttttcacccatcacttcattcctccttgttatgagcacttaccgcctgttatacggcgcttgtgtgcaatacatgccactggcacgaaaacggccgtcccttgaccgttttgcgcagtggctcacctctaaaagcgttgcgctgctggccgggcagacagctgcagtctgtctgtcggctccctcaccgcaggttccccccattgcgtccggaggattgtattgtgaaaaattatacaaagttaaggcgggagcaaccttaccggttactcccgccaaaaagaccctgtataacttttactgactttttaaaattatctcgtctgcggtatcgtaaatgaccgcgtccgcctttgattttcataccgcatccccctgtcttgatttcacgtaaaaattaatgtgcctaaaaatttttgtatattctaactttttttgtattttttccataatatcacaaggacattgtacttgtcaatatacaatctaatatttaacaatctcaaaaacagcccaacacttatttattctgtctttatatatcagaaaatttattaatattatcctacaaattctgtcgattttcagaacctctattccttaattttccagcatatgttacaatagtacctatcaaatacaaaaaattttcatatgcagaaaggagtccttatgttcgatttagactttattctcacctcactgggatttattgtcccggtcattctggtcatcatcatcattacccaggggtacgtcaaggcgccgcctgaccacgcctacatcatttccggcctgcgcaagcagccaagggtgctcataggacgggcaggcatcaaaattccgttttttgagcagctggataaactgtaccttggacagattacagtggatatcaagaccgatgaatacatcccaaccaacgatttcatcaatgttatggtggatgcggttgccaagatacgggtggctgacgacgacgaacggatgaagctggctatgaggaacttcctgaacaaagagccggcaaacattgccgccgacctgcaggactcccttcagggcaacatgcgtgagatcatcggtacgcttacactgagggccattaacacggaccgtgattccttctctgaccaggttatgattaaggcttccaaggacatggagaagctgggtattgacatcctttcctgcaacatccagaacgtgacggatgaacacggactcatccaggatcttggtatggataacacctccaaaatccgcaaggacgcatccattgccaaggcagaggcagaacgtgatattgccattgcccaggccgctgcggacaatgccgccaatgacgcaagggtggctgccgaaaccgagatagcccagaagaacaacgagctggccatcaagaaggccgaactgcagaaggcgtccgatacaaaaaaagcagaggcggacgctgcctacgagattcagaaacaggaacagcagaaaaccatccagaccgccacggtcaacgcccagattgccagggctgaacgcgaggccgaactgcgtaaacaggaagtactggtgcagcagcaggcattggaagctgagatcaacaaaaaagcagatgcggaccggtatgccattgaacaggctgccgctgccggcctgaccaagcgccagcgcgaggccgaagcaaagaagtacgagcaggagcaggaggccctggccaagaaagcccaggctgacgcggaacagtatgagcgtgaaaaagacgctgaggcgcagaaggccattgctgaggcacagaagtattccatggtccaggaggcagaaggtatcagggccaagggcgaggctgaggctgccgctatccgtgccaaggcactggctgaggcagaaggtatggagaaaaaagccgaggcttatcagaagtataataaggcggccatggctgagatgatgattcaggtgcttcctgacatcgccgggaagattgcagagcctctgtcacagattgacaagattacaattatcggaggcggcagtgattcggataacggcgtaggggccattgccggcaatgtgcctgtggtcatggcaaagctatttgaatccatgaaagaaaccacaggcgtggacctggcagaaatcatgaaggcggatacatatgatgccaaggtcaaccggaacgtgaacctgaccggcgcccctgatattatccttggaagcgggcagaaggcccttaatcctaatccgaattcggataatatccagccataaattctttgtgcccatggaggatattttaaattagtatagcagaaacacctcatagaacaacctgtgatatagatacaggggatttctatgaggtgtttctttttacttctattcttctctgtctttcttaccttcccgggcctccttagcgccccaaaccacgccttccatgtcaaatgtgcctgcggatatgtcaatgtcatggtctgcttccgctcccgcagatactctcacattccctttctgcacatctgctgccgtctttcccggcccatctgctgctcccggcatttccggcatattaggtatttccagcatattcggcatacatgacatatccggttctcctgctgctcccggcacagccgcagtttcccgttcttcccgcacaggctccctctcaggatccctcccaggctcctgcccggctccgcctggttcctctatcttccagcggatggatacgcggaacaaatcatcctccacttccagcttcatggtaccgccctggacctccacaaagcttctggcaatggcaagccccagtcctgagccctctgtgttgcgtgatgtatccccgcggacaaaccgttctgtcagctcctcaggagatacctccagctccctggctgaaatattgcgcatggttatcagtacatggccgtcatcttccctgaccacctggatataggcccgtgtgcccggcattccgtactttgttatatttaccagcaggttttcaaatacacggtaggtcttctggctgtccagataaagaaggattttctcctcaggcagattgtatcggaactcgatcccgcttgcctcaatcttatcagacagctcaaaccgcacctgctttaagaggctcacgatatccacgtcctcctggtgaaggctgactgtgccgctgctggctttgctgacctcaaacaggtcctctataagcgccttcagacgcatggatttctggtccagcacccggacataggactttctctcctctgctgtcacattctcctgctttaacagatttacgtaagtgatgatagccgtaagaggtgtctttaagtcatgggatacattggtaatcaattccgacttggtcctctcgcttttcacctcctgggccactgctttcttaaagccgtcctgaatccggctcagctgctccttgaacgggttaaagattcccagatcctcctgaatctccacatccaggtttccctctgctatctcattgatactttttaacagcgtattatatttctgctgcatctgcccccaatatttctgtaataggaaaaacagaaccagggagtaaattaccagggctccgattccccagaaccagagacaggagataatggtcagtatgacaaaatttgcaataatggccttgcctataatcttggtggaacggcgctcccaatcagtctcgttaaaaacattgagggcatttaatgtccagcgcttgatgaagcgcaggaaacgtcccagccatgtgcgctctttgaaatagcgccaggggcccagggaaaagatagccctgtaacaggtaattccccagtaaaacattccgtagctcaccatccagaacgccagattaatgaccactgccatcacatccgcggaccagggaagaaattccgctctcataagttcgctctttaagctgccgtccatggtagaagcaatcagcgccatgggtatggttccctcaccaataatacccagccaggccactccgatacagctcagcggctcaaatgaaagcctgcacagtgcgctcttaccaatctcaaaccgtttcacagccggcaaagccagggccagcacggtcagaagtcccagtacagatgcgcctattgcaaaatagccgttgctgaaacggtaatcccggatagtaagctgctgatccgcgctgttagacctgacatccgtatagccgaacatctgggatggactgcaccggaacaccactgtcatgtccttgggtccctggaattccacgccgctgtagcgatagttctcgtccagtctgacctccagcggatcgtaaaattcaaatctggtcaatgactccttgatgcgcgtaatatcatcatccctgtttccctttatatccagaaccttcagtatgccgtttgaattaaagtttatggtgaactgaatctggtcatccttcaggggttcctggaaaaatgtctttggatccgtcacattgctgcgtccataggtcccatcctgctcacagatcccataggacaagctggaataatactgcctgtagaggctttcccattcgcttcccgcgctgtcaatggtctgctgcatggactggtaatagtaaatgtcatagggatccccactgtcgtagaccatggtctgttccccatcttccccatactctatctgtaccgcggcttcgtcttccggctgctgctggcggatcttttcctccagccccggcaggaatgtctgggcataggtcagacgccgtcccgtatcctcctgcattttctgatgccagatttcataactgaaattcataacctgggttgccaggtttccaaaattactgctctcctcaacctggcggacggacctcctgttgtggtagctctccgcctttgttttcatataggggtataatcctatggttccggctgatgccaaaagcaatgccagaataataatcaatattcccagcctatggctgcttttcaattttgtatccaactccccacaccacctttacatatttgggctccctgggattcacttctatcttttccctcaggttacgtatgtgtaccatgaccgtatccgtattcactgccctctcgttccacacccgttcgtagatttcctctgcgggaaatacacgccccgggttctgtatcaataaaagaaggattttgaactcgataggggttaccttaaccgttttgtcatccacggtcacctctaccgtctcctcgttgacctccaaacctcccagcctgtgcaccttcggattctccgtctgctttgagttcagacgatccagaaaccggtggtaacgccgcagctgtgagttgaccctggccataagttccattggagtaaagggctttgtgatgtaatcgtccgcccccatgttcaggcccagtatcttatccacttcctctgacttggctgacaggaaaataacgggaaagtcatatttttcacggagttttgctgtcatagtaataccgtccatacgcggcatcatcacatccacaatggccagatcaatctctctttcctccagcaccttaagcccttccactccgtctgctgcctggaatactgcatatccctggctctttaagaatatttccacgccttcccgtatctctttgtcatcctctaccagtaaaatccggtccccattcatgttcatttcctccttacgctatttatactaacaactaaaacaaaatttaaccttcataaaaaacaaaagaatatctaaagtcttattgtaacattcctaaacacattgttcaacgggggatagctgtctgatccggctgctttgccccaggcagcggtatataatgggctgaaaatcactgtcaatataggtgttatctgttaaaaattgtgcgatattgttatttatatatttaaattgacaaagcaatttactcatgatattgttgtagtaaattttttattcagaattatcaatatttaacaaattattttcaattaaaagggaggaattacattgagtacatacgtgattacaggcggcactaccggcataggagctgccacccgcaagctgctcctgtcccagggccatgaagtgtttaacattgattttaagggaggggactgccttgcggatctgtccgctccgcaaggacgccagggcgctattgacgaggtattccgccgctatcccgacggcattgacgtactgatatgcaatgccggcgtaggacccacggctccgccccagatgatatttgcgctgaatttctttgccagcgtcaagattgccgaggcactgcgtcccctgttaaagaaaaagaaaggcaattgtgtggtaacctcctccaactccatcaccaacatgacggtgcgcatggactgggtggatatgctgtccaacgttatggatgaagaacgcatcctggaatttgtaaaagacattccccgtacccaggccgcatcctgttacagctcctccaagcatgccctggcacggtgggtccgccgggtttcaccatcttgggcagtggacggactgcgcattaattccgttgctccgggcaacaccactacgcccatgacacagaacatgaccgatgcccagatggaatccgcactgctgattcccattcctacccgctatggacgcaaggaattccttgacgcggaagagattgccaacggcatcaccttcctggcgtcacccatggccagcggcatcaacggggtcatactgttcgtggacggcggcatcgacgcgctgctccggtccgaacgtttctaaatgaaaatggaggatatggatatgacaattctggaaagctatattgactgtatgcaaagaggcgacgaagcggccctggcggatctgttcaacgaatacggagtgcttcatgactcgtctctcattaaggcaggtatggacaccctccacctggaaggcagaatggcagtggaaatgatgtttcaccacaagttcggctttaacggaggtccctttcccatacacagcgtaaaatatctggacggcaatacggtatggtatttcatcacctacaacgagcatgtggttcctgtaaccgccttcctgtccggggtggatgaggacggcaaaatcctgcggcttaatatctatccgctataaaaaaggaccggagctggaggaaatcgtttatttcccagctccggtttgcgttctattcaaagatgaccagtttctccagtgttttttccacatctatcagggaatacaggctgccattccacataaaatatgctttttcaacccataaacctgactcctgctgttccggccccttgatttgttcatccacgccaatctgagtcagatatggctcctgatacagaaggatgcccagaaaatatttctgatgacggaggaccagtaccatctgcctggcttctgcctcttctccgccggacgcagagccttcctgacaaaccaccggcacaatgctccccttatagttgcagacgcctgcaaaatgtcccggaagacatggcatcagggatatcatcatatccttgcagatttcctccgcataaggaaactcaacagcgtaattcctgtgctttcccggtaaacagagcaatgtctttaacgcctcatccgccataccttccctccttctcatatctgcttatgataatttccgtatccagcgctgcgcagatacggccgctgcccatgatgctgcagccgcagatgcctgtcctggaccgaaatcctgttcccagaagtgccggaagattcttcaccacaatgcgcttctgttcatagatggaatctatgaaaaagcagccttccttctccgcacccttcacatacaccagaatggcccgctccggaatctcccctcccagggaatagaacctgcggagattaataagaggcatcatcctgtcttcatacaggatgtaatcccgtccgttaatttcacgaatctgtccccggaaggactcatactccagaaaatgatatacatgccgggccggtatggagaagcggtactggcccacgcggaaacgcacgcactcgatagatgccagattcaagggaactgatatggaaaaggcgcttccctgtccaatagtactgcggatggaaagatttccccccacgtcttccataatgttctttaccacatccagacccacgcccctgccggaatattcagtaactttttcattggtggaaaagccgggatataggataaactccctgattttctgggggtcatactcctcgtccgcactggcaaacagccccttttgcctggcccgttccctgacccgctcctcgtcaatgccttttccatcgtcgctaatggtcattctaagttccccggccacattatcagccgaaaaggtaatctttcctctcctgtccttaccggcagccagccgttcctccggggattcgattccatggtccaccgcattgcgcagaatatgcagcagtgcttctgatacataatctaccacactcttatccgcttccacgtccgaacatctgaccaccaggtcagcctcctttttctggtcacggcaaatatccctcagtgccctcttaagctttggcacaattctggacacaggcacaaggcgcatctccatcacggaccgctcaatctgtcccaccaaaaggctgatctgatggcccagtccgctctctaaatcctccatcccattccgtttaagttcattttccagcacctgcatctgcagcagaagctctgaagccaggttttgcagatagtccagacgctctgtccgaacctccataaattcgccttccctggaatctgtattttcccgctcaggcgccgccttctgggcagccgcagccgtatcctgaggctggctgtcagccaataccctgcactgtgccacaaaaagccccttcctcagagtctccagcaccttctccttatcgccgctctcaaaacggatgaacacaccatggccttcaatgtactgcgcgctttcaccctgtttctccaggttttccggataagtctccaccagggtacagagaccggtaatggatcgcaccagcatgaaagcacgtatattctccatgcggcagccttcctccagcgtcacattgactacggttccgcttttggagacaaatagttcaggtatgacaggcagttcctcttttccctcttcctccccctgcgtcttcccgcccttcccgctgtccttctcctcttccctgctgacatgccccagaaagtcatccgtcatctgctcaagcacagacgtatccccgggcgcataatcctccctgttcatctgttccagttcctgggcaataaaatcagaggcagcaaacaaaaggtcaaaaaggtccggttccggatgctccagcttgtccatattttccctgtagtaagaaaacaaatcttccagcttatgggccagggaagaaagaccgttaatgtccatcatagcggaggagctcttgatggtatgcatgaccctgaaaatactgtgaatactgctttcgttaaatctgcccgctctctcagcctctaaaagtatctctgacagctggccgtttaactgcctggtctccaacaggtatacttccagcatctccagggcatctgactcaaaatatcccataatacactccgtccattactgctccttataccacacgctctggttcttgccatgccgtttgccataatacagtgccttgtccgcacagccaattccttcctccagcccttcctgctcatggaagatgtgaagtcccagagtcatggtacagaaaaagcccttatcgccgtaaggtatcacaaattgttccacctgccggcgcaccttctcactgagttcatatgcctcgtcctttgtcacattaaaaagaatcaaaagaaactcctcgccgccccaccggaccactctgtgtctgcggcagtttgattccaggatattggcaatgcataccagcgccatatctcccgcgtcatggccgtatgtatcgttcacctgcttgaagtcgtcgatatccgccatgataaatacggtttttacctcatcctgaccgcaggaacgcatatcctccatcagatctcccaccacataccgccggttatacagccccgtaagcccgtccctgtaggccatatagttaagcttctccatattattgcgaagctccctgttctggcggtccaggtcatccctctgctttttctgtatcagatgcgcacggattctggactgaagctcctttttcacaaaaggcttcttgatataatcacatgcccccatagaaaagccttttaccacatcctcgtcgctggacctggatgtaagaaaaataatgacggcatttttatggtctaagtcctgtaatatcttatacagttcatatccgtcggcatccggcaggaccacatccaaaaggatcaaatccggctggcactgtctcagctgctcctgagcctccagtccgctgtgagcctcacagattatgatactctcctccttcagcgctgtcttgatttgttcacaaatcaaaagactgtcatccacaattagtattgtctgtttttcatccatggacattatttcccctcccggccttacaatacgacggctgaatgcctgaccgtattcacttccagccttccgttttctgcgtaaaatagtatggtcctgccgtaattctgccctgtatgctgggctaccagacgaatcccctcctgagcaaggcattcccttacggccactacattctgctgtcctatatccaacattccggacggcgcaccaaacattctggcgcccccggcaatctttgcaatcagacctgcgggccgcgctccctgctctctcatctgatttatcagctcatgtacgccctcatcggcaaacttgtaggcgttatcccaatggactgaatacttcctttccggaagtataatatgggccatgcccgctatgcgctccctgcggtcgtagagacaaatccccacacaggagcctagggcataggatataagcacctgattttccctggcaacctttccttccgcgattcccacaatgattttatccatagcgctgctccctgagccgtgaaagcatagttcccaaatcttcctgctccggaaggaaaagaatacgtcccttaaagatttccccggacatatggaatatattttctatgagaagtatgtcatcgcttacaattacccacttggacatgggataggtgagaattgccccgcccatatcaatgcacagctccggcaccgacacatccatatccatgtccatcagctgggacagggcccgtatgtaggaaccgcacatgatgttccccagctcgctgatcaaagaacactccatatcatccagagacgtaaggttccgttcctcctcccccaaaatggtatttattacggtcttggtaaaggcttcgctcagcataaacaggaaaatcccctttagctgacccgtaacttcaatcagaatgcctgtctgcaattcctccggctgttccaggagttcatgcatcttatagtactttaccacttttagggaaggcatatccaactcaatgggctgttccatcatctgtgacagtgaagtcactgcgtttcccgtccccacatttcctatttcttttaatatatccctggatatctcatccaactgtacataaccatccattccctgtatctcccgtgattaaaattcaaacctttccaccagctccttcaacaactgggcctgggcagacagctcctcgctagctgccgcgctctcctcggatgtggctgaatttccttgaacaatctcagaaatcagttccacgctctttcttatctgtgtaatggcatccgcctgctgtacagatgtctctgagatcttatccatcttatggctcacctgtctggcgccttccacggaagtcttcagggtttgtgctgttaaattcactgcatccatgccatcgcttaccgcatcggaattcttttcaactaattcagctgtcagcttggatgcacctgcggtcttggtggccagccgccttacctcctctgccacaacagagaatcccctgcctgcatctcctgccctggccgcttcaacagcagcattaagcgccagtatattggtctggaaagcaatgtcctcaatctgtctgactatgccggtaatctttcctgaattgttcttgacctcatgtatggacttcatcagggtttccatctgcccatcacattcctccagcttctgtcccaccagagccgcctgtctgctggaatccacggcgctgtcagcattatcctttacgctctgcgcaatctcgttgatgctgaccgccagctcctctatggaacccgcctgttcagatgctccctgggccagagcctgagaactgtttgatacctgctccgctcccagtgacacctgctccgcactgctgttaatctgttgaagtgaattgcgcagcagacggctgatttccttaagcccattgcccaatgccacgaaatcccctttgaattccacttcagagcggtaatttagccggccatttccaagggcggtcagtccgctttgtatctcagacacatagctgttcagaacctttgcagtacggcggatgtcatctgccagctgacccagctcatctttggacctgtacccaagggcaatattcaaacggccgttggatatggtatttgaagcctctttcacctcattgatggggcgcacgatatttctggtgaccatggagcatataaggatggtggctgctatacataccgccgacagtataaccagcatgattatgacccgatggttgctgtggtgctctgtttctatgcttgcagctgtttcttcagctgacaggtccgccacttccgagagcactatccttacatcattggaacggggcagatactcgtctgcatataaggacagcaccctctcatcctcgcccgcttccagaagggtcattatcctggcccttgtctctgccagtatctgaaacttttcgttcagctcctccaccttttccggcgctgtaatatatccggtggacagctcggacaatgcagcttgttcatcccggatcagctccctggtattctgcaggtattcatcctcgtccaccagcccctccgtggcagccaaaatagcgatatttctcccaactgcccgcagactggcagtcatccgcagggatgactgcacattggcaaactggtcagcgtaaatggcctccatacgcgacgatatcgtttccacgttgacaatggccactgtcactgtcactacatacaaaaggataatggaaaaaaatgcaatgaccatcttccttcctgtcttatagttcctgaaccgctctctcatcctttgtttccccgcttttctactgttccaggcagcgattgactatcctggagaactcatccgccttaaatggttttacgataaaatcagcagcccctatggtcagggctttctgaatcatcatctcctgcccaacggcagagcacataataaccctgatattggggaccaggctcagcatctcctccagcacctccatgccggaacgtcccggcatggtgatatccagaagcaccagatccgggctgacttcccgaaacagctccatggccttttccccatcctgggcctcccacacctgggtatatccgtcctccttaagtatcttgcgaatgatgctcctcatgaacatggcatcgtctactaccagaatcttcttatccatatagtccccctctatcctcattctctttgacaggctttttatatacagccggaaaaactgcttccagcctggtctcctccctggacaaaagctctgcatggcccaccagaaggtaaccgcccggactcaggcagcgttccagctgctttataagcttctccctggatatccggtcaaaataaatcataacattccggcataatatcaaatcgaatttctccggcccaggaggcatctccatcagattatgccttctgaaacgtatattgtattttaatttctcatccacccggaatgtatggttgtcctccaccgtacagtactttctcttccaaagctccggaagatcctccatttccttcagcggatatattcccttttctgcctttctcaatacttctgcggatatgtctgtggcaagaatgcggacagccggcatacgctcaaacctatccccgtaatcctgaatcagcatggctatggagtagacctcctccccggtggaacatcctgcattccatatgctgcagccccccatcttccggttctcaaacagctccggcaatattttattattcaggatagaaaaatgggccggctccctcataaaataagtataattggtggtcaggcggttcaccatctcaccagccatctcaccggtcctgtcctttctcatctgctccatatactgggcaaaggaggtcaatccccttttttccagctccctggccatcctgcactcgatcagcacctgctttttttccagatttataccataattgtcccggatgtatcccacaatctcacagaactccctgtcattcaatcgtatcacattttttctcccatattcccggcatgacttccatcatcttctcgggttccccgctatcttcagctcccggttccccgatgactcctatcatagtcccgtccctgagtcccaggatgaatccacagttacagccgccgctgtctcccagccggcagaacacaaccggagtcctttcatacagcatgattccgcagatatggtcaggtgcgccaggcacctgctgtatctgcggatgtatcaccacttgcttgataagatttttttccacatacacggtacagcttccgtcttttacggttaccagctccatcattctgtctccttcacagcaccggccgtggtataagaagagacgggaccactataaacgccagttttcctttttcctcttccgcatccaatgccgccatgcgatccatatactggttccggctgcttctcaccgcctcaggaatggcatatatctgttcttcctccacctgtaccagaccagtcactacctctgcccttataccaatttccctgtcaccgcagtctgcaataatcagataggcctggtctgacaaatttccagcctccggcagctccaaaaagtcagccagggccatctccggctcccgttctttcatgtccgtcacccgctttacacaggaaagcggaagaaggaaatgagaacccgctgaaaaaaagagcaggtaggaattcacaccgtcagccatcctttttccctccccatgatttgagttattctgagcccttaacattttgtttatattctatcatatatgggagttatttactattggaaaattcaaaaaaggtccgggagcatatcccggaaccttttctagtccgtattaaaaaacagtttctttattttttctgaaaaatcaatccccagcttggcagcctcttctttcaggcgttccctgtccaatgtaaaatctatggtatccttgcatgtaacctttaatgaagatgccaaagccgctaatccacccaagcccacgctggaatcatgctcataaaacggaactccacatatcaacccgctgataaccgtggcgaggaagcagtctcctgctcctgccgtactgttgaccggcttccatatagctggtattcgttcgctatagccattggcaaagaactgggctccctctcccccctgtgtaacaatcaactgaattccaggattttgactgcgcagaaacccataacactccggtgcaccactttcagcttccaccccgcctgccgtcacaagggtttccatctcatgcttattgatagccaaaagatccacatattgaaaagcgcctgaacttatgcattcccccatctcgtcagaagtaaacgatgcaacattaaagcaggaattctctcttccctttttcaacagatacaggcggatatccagaggaacctccggtgctgccagtacaagccccctgccttttaattgttcctgttcaaaaaaggcagctatatcctcctctctcatattgccgctggcactattgctggttgtaatattacctccgtcactgtcaggatatacaaagcatactgaatacatggtcttttcatgagaatccacatttacatacctgcagtttatcccgtactgctccattagtcccaggacctctctgcctctgacgtcatccccgactctgccgattgcatagacaggtatacttttattcagataggttataacataatgaagaataatgtgaagcttacagaagtcccgcacatccataagttctgccagcctggactcattccttcccaaagtgatgttatctgaaaaacggaagaggattcccgaacctatccctccggttcccaccacgtaatcgtatttcagttttctcatatatttactcctgcaaatttccattcgggatgccttgatatgggatggttggctgtctcataagtggcggtaataatggcatccccatgatcctgcagaagcgtcataggatactccgaatccttctccgaaaatagggccactcttaaagccgtttgtttccaggaacctgtatcgctgtataacctgaccttctttgctgacagacattccctgattccaagtgtaatggacataggagggacaaactgatatgctgctccataagacctttgtcccaaggtgataatggtatccaggttattctcctggatacgaataccggattccttcagttcctctatagtaatatgggaaaagggatgtcttctgctctgattataggctatatgcccatcctgcccccatcctccaagcgtgtaatccaacggtgcctccgctattttttcttttacttcatacatattttttggggtcagaaaattcctgttggcttcaggtatatttaaaaccggatcaatgggaccataaaattcacgaagcataaatgtcctaaaattatagggatcatcctgggccaacagatttccctgccagtccagacattcatccatatggaatatagttacatgcttcatgtttatccggtttttgtttatatactcagcaaagggagcataccagcattttggcccgcatggcacaatcgcccgaaactgcctttcttctctgcccgcctgagcgatttcatcaacaagctctctggccatcatttgtcccatttcacaggaatccttcaccattctgaaccgtatgaccaactcaggatgggactccaactcttccgcaggtatactgcaccatttatataaatcttgtttttttatcatggcttagactcccgactcccctgtttctgccttccagcacaaacagggctttgtttacatctcaattagtttaatatccgttaagtaacaaaactctttcagggttccataaatctcttcatctccataggccagagttatatattcactgtcccacacctgtacaccatagtcatagtccacatccatcttaataaatgcgtgaggccagaaccacatgccggattcagtccgctggtcctttaaatcatccggatccggtgtgtaaacctgcccccggtgaagaatcatctcaaacattccgttatcacgtcctatgcgacccattacaacctttccgggttttagaactgcctctacggacaggcctccggctgaaccttctgtaggtaatccatgatgtgcaaatctggctttgtccggcccggccagggagggcgcacaggcaccatcaccaattaccttaaccacttttttctccttatcaatgcattggaaatcaccataatatactggatccggagtcagattacttaacaggaatacagtgagtacattattataatcacacagtgtcgctgtgggaattccctgctgcagcatcatactctgcgtaaagcagctggcagcatattcctctgccagaccaggaaatgactgaatgacatacatatcaaatttttctttctcaattattttttttactgctaaatacaatctgattgaacgctccgtgcaaccgtcatccgggggcatctcctgaaaatatggcttaatcagattctcttttacgtcctgaatttcttcttctgtcacttcttcggcagctttcaatatatccatggaatccctggaatcaatgtccacgccaaactctctcatgaactgtgacggatccgcacatccgcaggtcaatcccattcctcttcctccaaaggcccctatggttgtcatattcaacttattccgcagtgcgcatgcccttgaaaaacatgccaccttttcgaccgtatcattgtcacttccataaacagaacggtacttcatgccgatttccttaaaggatgcccctaatgctagggttcctaccagtctccatccctgagagcccggcacggtccagataataacacccttgccggcacgttcaaaatctcttaccgctgccacgatttctgaagcccatacccaagttccggaaaaaagaatcactccgtccacactgtcatcatgctttaatctggcaagcgcctcacgggcttcctgcttataggccactacaatttcattttctaccagctttacacctttggcctcaatggcagccttggattcatctataatcttctggttaatgaacggcactcctaaagggtcctttaacccatccttatgtaccccaaacacgataaatcccatttttggccttatcatcataattcagtccctcctgacttcaacattaatgttttctttaacaaacgaatttcctatctaaaatctgcacaaataatgatctactcggatttctgctgccgcttctgtatgaatcggtcaaatcccactgccaataacagcactaatccctttaccaccctctgccagtaatcatcaactgccatcattgtcattccattagtaagaacacctataatcaatacaccaaaaaccacatggctgatttttccgacaccgccggtaaggctgacaccccccagcacaactgccgtaatgacatccatctcataactctcaccggccctgggctgtccgctgttaagacgccccagcatgactaatcctgccagtgcactgcagaatccgcttaccgcatacacaaacgccttgattctgtgaacactgataccagacaacctggctacctcctcattgccgcctactccatatatgtatctgctgtgcctcgtctttgacaggaagaatatacctgccgcaaatgacagaacaagtatgatgaccggtatggggactgctcccacatagccctgaccaatgacagcataccgtgaatcgaatccaaatacaggagttcctcccgtaatcagatacgccacgccgcgtaaggaagtcatggttcccatggttgctaccataggaggtatccctatgtgactgataacaagcccggttgcaaaccctataagggtacataaggctagggaaatcagggatgcaataattggattaacattgtttatcatcatcattgctgtcaggacgccgcttaccccaatgattgcccctaccgataggtcgataccccctgtcaggatgacaaacgtcatgccaatagcgcagattccattgatagatacctgccttaacacattggcaatattgctacccgttaaaaaattaggtgcaaatatgctcatagccgcaaaaagtacaataaaaatgattataatggcatattctgcaataaatgtattaatattcattttattcttcatatgaataccccttctataaagctgcataattcagaattaattcctgggaatattcttcaggcatcaattcctttacaacctgcccctccttcatcacgataatcctatccgacattccaatcagctctgacatctccgacgataccattatgatgctggtgccgttgtcagccagttgtcgcatgattttatagatctcctgtttggctccaacatcaatccctctggttggttcatcaataaatagcacattgcattccgttgcaaggcatttggcgagaacaaccttctgctggtttcctccagacaatttcattactggctgcagaagtgagcttatttttatggaaaggtcagcaaccagcttattgcagatatccttttcctgcttcttcttaattacggcaaagcgggataatctgtccagaatggcaaatgatatattatgttctatgctcatacccataattacaccctgctgtttcctgtcctccggcaaaagagcaatactgtttttcagggccactgccggcgaggtaatgtttattttttttccctttagaatgatttcaccttccgtaatttcatccgccccatagagcgccctgagaagttcagtccttcctgcacctactaaacctccgattcccagtatctccccctttctcaaaaccagtgacacatccttaagccttctgttgcttacatggctcacctccagaactttctcctcgttgatgtggcctaaatcgggaaatgtctcccccatctcccttccgaccatatctgcaatcagggtctcacggctggtctcagaaaccggatgagtagatatatatttcccatcccgaaaaactgatacgcgatcgcatatttcaaagatttcctccattctgtgggaaatataaatgatagtgattcctttcccctttaactgtcttacaattgtatggagagtctctgtctcctgttctgtcagcggtgccgacggctcatccatgataatcaattttgcattctttgagatagcctttacgatttccaccagctgctgctgtgcaatccccagtctctgaacacgaattttaagattaatggccgttccaatctctttaaacatttttttggtattttcattcatctgctcataatccaaaaaaccttgtttcatgagttcgcggccaaaataaatgttctcacttacagacaggaacggtatcagattaaattcctgataaatggctgttattcctgcatccagcgccaatgaaggagtcaatccgctatatgcctttccgtcaaacatgatttttccttcgctaggtgtgtgggcacctgtaagaatcttaataaaggtgctcttccccgccccattctctcccaccagagcgtgtacttctccccttctgacagaaaaatcaatattattaagggccttgattcccccgaaccgcttggaaatcttatggacttccagaattatatctgtatcatcaatttgaggagtttcctctaaccgattgttcattcatccacttcctccatcattcctcgcacttcattatggctagtttccaaccacatctttctgccaaactggctcataccttctctgaaccactgcatcttcctgtttttctgttaaatatttatacatagcttcggccaggtcctcacctgcttcataagggaacaggttgcaggatgatctgtaaacactgttttcaactttcattttttcttttccttcatccgtggcatcacagccgccgatataaaaattgtccggaattttctgcatggccgatactgcttcgtacgcgccgattgccgtaaagtcatcgcaggcgcatatcacatttacctcaggctttgccaacaaaacggactccgtcaccttcattcccagatctgtattgctggcattctgtctggctaccacctctgcctcaggggcgttctccaaaataccatcattgatgccgtctcctcttcggatgaccgcctccacatcatcttgagcaagaatcagcgctcttccttttccaccctgttctgctttaatccactcagcggccgcattgccaatagcatatcctatattatactcatccagagagccgtcaatctgcgcattgctcacaggctgcgcctctgcggatactacgattcccttttccttagcttggtccaccactgttttcagggcattctcatccaaaggtgatatcataattccgtctacatcacgctgtaccgcatcctctacataggaaacctgagtggctacatcatacttggaatccaagatctgtgtcttaattcccagttctgcacattttgactggaatccatcgtaaacctggataaaatacggattggcactgtcctgcgtcacatatacaaattccataccggagtctgccttattatccccaccggatgtggcggctgtatccgtatgcttctgttcagccttatcgcccgcgtttccacccgaagcagagcatccagccaatgtccccataagtgaaagaactaacaacattgctaccatttttttcttcatgaatatacctccttttggcaggaaaatgattcgaaacgtttcgattttcaggtaaacattaaggtgtttgataaacaccttaattctttatcgtttgacagtgtctctgataatcaaggatggctccaaaataactgagtcaggaacaataccatactgcaaaaggttcatcaggttattgactgccagcttgcacatacgctcgatgggctggctcacggttgtcagcggaatctggttgattgtagcgtatatgacatcatcataaccgcatacggacaaatcccttggaatagataagcctttaatcctggctgcctgaagcactgcacaagccgtaaaatcactgttagtcatgattgcctccggcctctccttcaatatctccatggccagcttctgcacatcatcaaaatgataggtactctcataaacattggactcggaataaaccagaccggcttcttctaacgccatcttataaccgctgatatatgtctcatcaacccgtctgtcgccaatcagcatcacgatgttatgaatatcccgttcaatcaagtactgtgtcatcagataggagccctttttcagattacacataacaaagggtgcgctactctgctcatagtaggcggccagaaacagatagggtattccatattcatccagcttcttcatatgttcaatatcattgacataagtcagctgcggaacccatataactccgtcaacctttctcgaaatgaattcagaaatatactttttctcattattactgctgtttcctgtaatccctaatataagaaaaaagccgtaactttccacttctcttcgtatgtattctgtaatctcactataaaagcagtttctcacatccggtataagcagaccaattacctttgttccggatgttctcagattacgggcagcattattgggctggtatgatagctcctctactgcatccaataccatcttcctggtcttgtctgtaaccccctctttcccattaatggccaaggatgctgttgatatggaaacacctgctagtctagctacatctttgattgtagctctcttttccattcattttcctcctagttgcataaaaacgtttcgataattcgattatagcacaatttttcagcttgtcaacgactaatactatacattttatacagttatcaatcttgctttatttatttatccatgttaaaatcaataatcatacattgaataaggagaaatagactgtgataaataccgaaaaatcgaaacgtttagatggacagttatattataatcaggaccctctattactggaagaacacctgaatgtccagatgctgcttcatcaatataatcatttgcctccgaacaaacgtaagaaacgtcggaaactcctaaagcaaatcctaaaccatccaccaaaggatgcctgtattgaacagccgtttcattgtgactttggctacaacatccatattggcagccatttttattctaattataatctgaccatactggactgtaataaagttaccattggacaccactgcctgattggccccaacgtcagcatcattactgtgaatcatccccaggacagaaagctccgttccagggatttggaatatgccacacccgtgaccattggcaacgatgtgtggattggatgcggtgccatcatcaaccctggcgtttctatcggagataatgtcatcataggttcaggcagtattgtaaccaaagatatcccgtccaattccctggcggtagggaatcccgccagggtcatccgtacactggactaaaagtcagtaaacaccagcactgtcctgttccctaaaccgcaccggcgccacctccggcgtcagcggctccatcctgtattccggcaactggtcaataagaccatccagacaaagagatgtgctgtggaccatgtcgtgggccagaaggactacctgctgccttcccataatggttttcatggcattgtcaatcagctcctggggccgggactttttcagcgcgtcgtccagactggcattccagtcaaaatagacaaatccccgtgcgtccatctcggctatgatttccttgtaaaccttccggttatagccattgatgctgcctccgggaaaccggtaaagaacaggctttaccccggtcacttccagaacagccctgtaagcttcctcaaaatccgccagatagctgtccctgctttcgtagagttccttgtagtcatggcggttgcagtggataccaatggtgtgtccctctgccgcgattctttttgcaacatcggggtgtttcctgacattttctcccaccacgaagaaggtagctcttatattcctggctttcagcacatccagcaccgcactggtattttcagcagaaggaccgtcgtcaaaggtgagatacatggttttgggattaaaatacagatcaatgcctttggcaatgccccctgccagtttttcctggtactgcgggtctgtcagccgttctctttcacggggattagacagaaaccccgtctcgatcagacatgatggaacaaaggtctgtccggtgaccgtaaattctgcatcccctctcagttcgcgggcctctgcccctgtacttctgactgcttccttgtggaccagcgcggctaaacgcccgctgtccgaagccccgtcctttccggaataccaggtctctattccccttgccgccgcgtcctcccatgtattttgatgaatgctgacataagcgccggcccggaccttgtgtgctgcctccacccgttcttcctttgaacggtatgcgtcgtcctcccgcaccatcacaacagtatatcccatatcctccagtttcaccttcagccgctccgcaatggccaggttgatgtccttctccattacgccttcctggctggcgccttcatcctcaccgccatggcctgcatccaccgcaataacagggggacctgtatataaagaattctgattgccaaaagaaaggagggattccccctggccttttatggaactttgcaggacatgtgtgtcttccaatatacgggacagaatttctgtccctccccgtcctgtaaattgccgctctatcctttcccgctctgttatttcctgctttatctgtccctgctctgttatttcctgctttatccgtccctgctctgttcctgccattcccaattcccgtttctccggtatgaccatggccatcactgccatggtcatgcatacgcctgcggccaattctgcggcggccagaaaaaatgcccttctcctggccctgcgcctggcctgccttctgcgctctgtctgtctgccataatcatacggttttatctctattctgtccatgacgcctgtcctttgcatataaaaagctcttgtgtactgcaatcagcatacacaagagcggcatcaaattatcatcatttttgcatcaaagttgcatcatctggaaattttcaggaacaattcattgattccttcataaaaaccaactgttactatggtttcttcctcctccccttggctgataacatatttttcaaagtaaggggttgcttccattaacggattctggtccccgaaggccgccggcttctctaaccccatataggaactccacgtacccacaatctgctccggatccatgtcatcccacagcctggacgacctggcatagaattcataaatccttccgttatctccatctatataggcttccatgagacggttttccttgtccgtatttttctggctgtttataaggctcagtttccagaccgccacattattcctgggctccagcacatcaatggctgaatagaggacagcgtcatactcatccttttccactggccgaacggattcaggcaggattcccagtgttttcagttcctccagcccccggttgcatgtctcataaatctgggagtccgtgatttcctggccggaaggccctctgtgattcatcacaaatgcataagccccctccagactctcatattccgcctggctgccgtttgccgccgtcaacgcctgccctgtttcagatatcagagcctgtcctgtttcgggaaaggtctggctgctcaggctttctgacaatatgtggagcttttcagcggcgcttaatgtatagcggtatccctccccctccgtatccgctgtcatggcatgtatctcccccaacatggtcctgtccctgtatctggtcagcatctcaggaccgcagatggacagggccataatcagacccgcaaacaacaggaataacaggtttgctgccattcttctcataactggtcctccttccagaggggcagggtgaagctcatggtggttcccttccccagctcgctccttatgttcaggcggcttttgtgaagctccagtatttccgcgcacagagccagtccctgccctgccccgttgcggcttctggacctggacttgtcaaccatgtaaaatgccttggtaatcttgtggagttcctccttcggtatgcccactccgtgatcctttacttcaaaacagtatccgtccttcatcagatggccgtagacctcaatgaggccgtccgcctcggaagctttgaacgcattgtccagcaggttcatgagaacagacttaatcagattggcctccgccctcaccatgccgtcatcatagttaaaatatattttcatgcttttgttgattacgtacatgtcatacaggtacagaaacagggattcggccgacaccatggtaaattccacctctcccctcctggtgaccatgatgtctaacaggcggaaggacatggcctccaggcgtttcccttccgtgtaaatatagttggcggacataaactgcttttcctcatccagcctgcgggagcgcagggcatccgcataaccgataatggaggtcagcggcgtcttaagctcatgggcaaatgcagccacaaagtcctccctggcctgaatctcatcttccagctgattgatgttatcctccagggcattggccatctggttaaaatccgttgtgagctgtcccagttcgtcgctgctgactttcctggccctgtggtgataatccccggaggccatgcgcttggtggccctggtcagcagacggatgggcctggtcagaaaggacgctatgagatacttaacagccgtaccgcaaagcagcatggccacagtcaccctgcggtagacagagaaacccagggacctgtcccgaaacacctctgacacgtccttcatggtctccagatacagcacccggtccagggcattgacagccgtacctgtctgtatgtagtatgctccatcctgttctatgactctgtatgtcctggtatcctggcctgtccggtccaaaagcccgtctcccccgccgaatccggtgctggcatagagcacatttttctgctcatcacaaatacgcagcaggcggcccgagctcctgcctcccgactccagattggatgctatctgactcaccgtggtatcctggagcacatcatacttggccggcacattgagggcagctgtctcaaatgcaaaacggagaatgctgctctcatccatggcctggtttacttcccggtccatggaggtctgaaacacgtaattgacaaaataatatccgctgaacccaaaacccagggccatgacaatcatggtccacagcaggagtttgaacgaaaatttcattgaactacctctaggcggtatcccaccttgtagaccgccaccagattattttcccatcccagttttcttctcagccgctgcacatgcaggtccagggtgcggctgtccccggaatactccccttcccacaccttttcatacagggtctccctgaaaagagccacatttttattttgtatgaagagtaccagaaggccgaattccttgttggtcagttccacattcctgcctgccctggtaaccctgcgggcctccacatccacggtcacgtcgccggctgtcagcagacgctccgtcttattgtatctgcggagaacagcctccactctggccaccagttccaccacgtcaaagggtttcaccagatagtcgtccgcgcccaggcgcagtccctttaccctgtcctttacctcatgtctggccgttataaaaatcaccggtatatccatggggcggatgtagctcatgatatcgtagccatccactcccggcagcatgatatcaagcagtatcaggtcaaaaaactggttctctatgagccggagggcctccgccccgtcctggacagacgtacaatggtaaccgctggccgacaggtttaaatcaatcaaatcacaaattggtttttcatcatctactatcagtacttttatcatggttctgtcctccacccccaatatgcgcgggccctgtccgtcaagcctgccagggtatcgccttcctctaatataagtgtttgtttcatgtccgtatcttcaaaaaatccgccggtccgctgatagtaaatggcgtagcttccctccacgaccgtcccgccgtcacttccctcatagctgtaatccgccagtatgacaatgtctttgagtccgtccccgtctatatcctggcaggtaacgccctttaacgcatagagatgttcatattctcccatgggctggaagctccagacaatatagccctgttcatttaccaggtacagcatgaataccgtgtactccgccatccggtaggtgcccgggacaaccaaaaggcggccgaacttctcaaaccggatagaacggctctgctccgaaatgaccgtcatcccgtgggacaaaagctcatcctgggcagtggatgtatacagaaactcggtagagtatccgtcccggacaaacgatgtgatgaaacggatgctcttattcatgccaaaacggttcatcttttcggagagtctgtaatccctgtaaaaaccgtcatttttctgaaacagcacatcccccaccttgtagggctttccctgtttaccggcgccctcattggcacaggcggttatgagcacgatatcctgccatccgtccccgtccatatcctgaaaggacacggcggccacccggctgtcgggctgcctgagctgacctcttatccggttattggtctccagctggtctgtcttatatgccatggtcccgtccgccctggcaaaaaacagcaccagccggttgaactccctgtcaaaagccggtataaagaacacctccccctctcccttcatggtcatggggaatatctggctgtccaccgcctcaaatccttccctttcaatatccccggtctgaccgaccgcgttaaggcgctgcctgtattcactgtatgaacgggaaacagcctgggaatccggggcaccgttggatgccccaggaaagcccaggcataagacagctgttgtgatcagaaacaggatggtccggaacgaaaaggcagaatatgtttgattcatcaatggcttgcaccagcttttcttaatgtactattccgattatatcaaataaagatgggaattcaaacatattcatggcctgtgccaaacaaaatatttgaggggatgccgccggtactcaaaagctgcccgaaaaaagaaacttaaggattgttcaccgcgggacgattacacacccctatatacagcggcgctcccatatatccggtgaccgcatataaaaagggcctgtccaggttcatctgcaaaactggctcacctgaatacaatccagcaaatccggcttctccgttctctgaaaatggacccacaccgttttcattgacgctgaacacggtggattggatcacaccggaaagtgaaaggctttcgcctgtaatacctgtaaaatcagcccggctgacatcaaatgcaccggtcagccccagaccggccagcgaaggacccaggtccgccgtggtggcggtctggaatttaggaatcttccagtaaattccgccgtaggattcaagctcatcaatcctgccaaacatttccctggtatactgttctgaggagagcagttcccggattgtcactccctggtcaggcagaacaactatcatggacgcgttatccgtaagggagagtgatgcgcgcaggaatccctggccccggtaataagtgccgttccaatgtcctgtcatatactgacaggttatatcctgtccatcggcagaatggaacacatctgttatattgtcctcagtcctgaaacctcctgtccactgggcctggtaattcactgcattcacaagtttcatgctttcaccggaagcggttgccacgtccatggaaatagcctgatccgtctgccagccaatccactgtctgataatggccggcaggtccggatttccaaagtccacccggaaaacagacgcatagtactcgttttccgatgttctcttaaatgagtcgttcagcggggccccttccttcagccacatggaatttaccagcttcaattttgtcttttcattgttcctgaatatctgccggtacagacgtccgcaggaagccgccaggccggccggaggctgtgccgtgtgcaaagcctgggccggttccggagactgagacccgtcaggtgtctgactgccgattcccataagcgccagcatctgggccctggtgtttccctctgcgccctcggatgcctgggccagggcatagtacaggctcaccggcgaaaaattcatattttcccggctgtccctcaaaagcggcaggaacaccctataggaaaaccgggatattccatctgtaaactccggattcaccgtgttgttctgggctatggcgcgcatgctgcctgaatcattgtacggtatgggatccgggtccctggaaccggattcacattgataaccttctcctgatacaccgttaaaaggcgcggcaaaggccgcaggacttcctgcggccagtacggatatggccgtggccagaacgcctgcggcggcaatggatattatattgcgtttcatgattcattccccctgtaatgactgaaaaaccaaaacaatttgcttctgattttattttaccagaatatcatcaggaagatgtttctattttcttaattaatgcggtcgttatctgttaccaaagggagaattccttatctcccaccacagggtccgcggttcccttcttcttgtctatctcatatgtattgatccggtggaacacatccggcttatcctcatatccaactgaaacctggaccatttgattgttctcataatccaccttaaactgcaggggttcttcttcgtcctggtacattcccatctccagaagcttattttccagaaggcggcaggctgcctccgatgtcatggacggcttctcaatccatacgcctgtctctgtatccaggcaataccagattccgtcaatccggttccagccttttaggagctcctgattttcttcgtagacccactgtccgctctcctcctgtatccattcccctgcccaggccggaaatgtacagcccagtatggataccatgaccgcaaccccagccaatctgtgtcttattttcattcgatcccgcctcctgttccagcgcaagtcttaaaaatatttttaaccatacaccagtatacctcataaacattaactttatataaactggtccgggattccttaactgtcgcaacacctctttcttttgtcctgcttccttaacccgcttcctcaaaattccctgtatacagctgatagtattttcccttccttccaatcagctcctcatgggacccccgctcgatgattcttccctgttccatgaccataatacagtctgcattgcggatagtagacagtctgtgggcaatgacgaaggtggtcctcccattcatcagggcatccatgccggcctgcaccagggattccgtcctggtatctatggatgaggtggcctcgtcgagaatcagtacaggcgggtctgccacggctgccctggctatggctaaaagctgcctctgtccctggctcagactgcctccatcccctgtaaggacggtttcatagccatgggggagacggtttatgaagctgtctgcgttggccagttttgctgcattgacgcattcctcatctgtagcgtccagctttccgtatcggatattgtccatgacagtacctgtaaagaggtgggtgtcctggagcacgatgcccagggagcggcggagggccggtttcttaattttattgatattgattccgtcatatcggatttttccgtcctgtatgtcatagaagcggttaatcaggttggtgatggtggtcttgcccgccccggtagatcctacaaatgcaattttctgaccgggttcggcaaacagcttgatgtcatggagcaccatcttggatgggtcatagccgaaatccactccgtcaaaaacaatgccgccttccattttcttataggtaacagtcccctctgccttatgggggtgtttccaggcccagacaccggtgcgctcttttgtctcttccagtgtgccgtccttccgttcccggacattcacaaattccacatacccattgtcctcctcctgcttctggtccagaagctcaaatacccttccggcgcctgccgctgccatgacaacagagttcatctgctggctgatttgggtaatcggctgggagaaatttttattgagtcccacgaaggcaatgatggtgccgattgtaattccacctatgccgtttaatgccaggattcctcctgccactgcgcacagaacataactcagattgccgatattggcattgaccggcatgaggaggttggcgtaccggttagccttatcagcgttgtcccgaagcctttcattcagcacctcaaactcctttttggcctgttcctcatgacaaaataccttgaccaccttctgtccgtccatcatttcctctatatatccgtccacctctcccagggagttctgctgttttccaaaatgggcggcagatttgcctgaaagacattttgtggcaaacagcatgacacaggccatagcaaaggtaagtatggacagaggtatatttaaaatcagcatggaaacagcggttgccaccagtgtgaccgcagaattggctacctggggaacactctggctcatgagctgccgcagggtatccacatcattggtatatactgacatgatatcgccatgggcgtgggtatcaaaatatctgatgggcagagattccatcctggtaaacagttccaccctcagccgcttcatggtgccctggcttactgtgaccatgattctgttatacgcataggccgccagaatgcctattaggtaaaggactgccatcctgcacagcgcccctgccaggggagaaaaatccggcgctgtattccccgttgacgcctgttgggccaacggccggatatagtcatccaccagggattgtatgaacaccatccccttcagggtagccccggcggacactatgatacaggccagcaccgcggtcaccgcaagtttataattggcagccatataccggatgacgcggcccaggaccctgatggcttcctttgtctccctggcctgctcctgtctgccggtttgttctttccggctgctctgcgcctgtccgctgttctgttttttcaggctgctctgtctgtcttccatcatgccacactctcctttcctgcgttttctgcctgaacctggtcaaagtcccctccgcccctgctctgtgactcgtatatttcacggtatatctcattggacctcatcagctggtcatgggttccgtatccgtttatacgcccgtcctctatcaccagtatgtggtccgcatgctgcacactggatatgcgctgggcaatgatgattttggtggttcccggtattgccgccccaaaggcttccctgattctggcatctgtcgccgtatccaccgcgctggtggaatcgtccagtatcaggatcctggggttctttaacagcgccctggcaatacacagcctctgcttctgaccgcctgacacattggttcctccccgctccaggaaggtatggtatccgtggggtagacgctctatgaattcgtcggcacaggccgcccggcaggcttcccggcattcttcttctgtggcatcctgatttccccaccgcagattctccagaatcgtaccggaaaacagtacatttttctgcagaaccactgccacggagtccctgagcgtttccaaatcatattcccgcacatccctgcctcctacacatacgctgccgctgtccgcgtcatagaggcggctgattagatttaccaggctggacttgccgcttcccgtgcctcctatgatgcccacagtttcaccggaccggatatgcagctcaatatcggacagcgcctgcccgcctctgcctttgtccattcccttatccgttctcccagcgtcctccttacccttcccataggaaaaacatacacagttaaaatcaacgcttccgtctgccacatccatgacaggccgttccgggttgcggatatccggctcttccttaaatacctcctcaattctccttatgctggcagcactcatggcaatcatgacaaatatcatggacagcatcataagagacatcatgattgacatgatatagctgaacagggaggtcaactcgccgctgctcatagttccaatgacgataaacctggctccaaaccaggatacggccagtatacagccgtaaaccaccagcatcatggctggattgttaaatgccagggtgccttctgcctttacgaacaggcggcagaggttttctgctgcactggtgaatttctggttctcataatcctcccgcacataggccttcaccacccggatgccggaaacattttcctggacccctgcattcaggtcgtcatattttgtgaaaacaacgttgaatatcttcctggccgccatcatgatgattcccagtatacatgccaaaaacagaatggctcccaggaaaatcatgctgagccgggggctaatcatgaaggacatgaccatgctgcataccagcatgaggggcgccctgacagccacccggatgcacatttgatatgcgttctggatattggttacatccgtggtcatacgggtcaccagacctgccgtgctgaacttatcaatgtttgaaaaggaaaagtcctgcaccttgtcatagattccctttctcagattacaggccagaccggaggatgcgctggccgcgtactttcctgccatagccccggatatcaggctgataaaagccatgacaatcatgactcctccataggtatatacctttctcatgttcccttcctggattccctcatcaataatcagcgctgtgataaaaggaagcatgacctccataattacctccagggcggtaaagagaggggtcagaatggaatcttttttatattgcttaagctgtgctaaaatcgttctcatattctgtctccttatatagtgtctccttattttttaggtattgcaactgactgtgccattagccggtaacggttctgaacacgcacaaaatagttaactagctaataattagctccctatatttatacctcatatcctgttgaatgtgaaattcaaatatgttataatctataaaaatattttattgtttactattagtattgtttttagagtcaatcgaacaaaagaagattaacaaagattgaaaagaaacagcaacagaaattcaaaggaaattcaggaggcgattcctatgaatacagtgcagttagaatgttttctggccgtggcggaatatctgaatttttccaaggcagctgattttttaaaaattacccagccggctgtaagccatcagattacatccctggaggacgagctggggaccaggctctttgtgcgtaccagtaaaaatgtaaacctgactgaagccgggctcatgttcatggaggatgcatccagcatcctgaagattgcctgcggcgctaaaaaacggctgggcataggaagcaatgacgttctgtttctcaccgtggggtgccataaccagtcagagttagatcttcttccccctgtcatacgcaggctggcggatcgtttccccaccctccaccccactgtgaaactgattccgtttaagtccatggccaatcttctggatgaagagcgcatccacgtcatgttcggcttccagcaggatgagcagaagaaacccatcggcttattccatgagctggcccggataccgctggcctgcgtgtgcagtgccggacatccctacgccgggcgcacctgcctgaatgtggatgagctggaggggcccatagtcctgggtgagccccacaggctgccagccaccgtactccagtctcaaatccgtgcttcctcctcctgccatccttcggagcttttctttgtggatacctatgaaagcatactggctctggtaagggcaggccttggatacagccttctccccttctatccgggcagtgataaaaaagggctctgttatatcccggtaacgggaatacctccccttgcttttggcttgtatcataaaggagtaaagggaaataccatactaaaagaattcatccggctattggatgaggaggtggctgccggtgaattccgggcatgacaaccctgcatgtttttcagcaggaccctgcatgttccccctgaaaaaccgcagaagcctcatcctttactgtactccacggtctgtcccttcatggtggactttgcctcgtacagggcaatgtccgcacatcttaccagttcctcaaatgtacagagttcacctccataccaggcaatgcctgacgaaatctggattttcagctgtattccgtcaggcagaacggctgggtgtttatccagaatatcatagaaatccctcaattgtttcctgacgccattcctgtcctcatagccaaacaacagaatgaaaaactcgtccccggaacgcctgccaactatggcatggtcctccggtatccctttcatgcatactgcggtctctctgatatagatatcgccgctttcatggccgtaggtatcatttactgaattaaggccatctaaatccagcataaccattgcggcggttcccaaattgacagggccgtttccgctcaggcccggcatttctcctgtctgtcccggcatttctcccgcctgttccagtatggcctctgcctcccgctggaaagctgcccggctgtaaatcctggtcaggctgtcatggtccctctcatatttaattctctgttttttcatcatatcaacggtcacatcctcaatgattcccagggaatggccgtggcgcagagacagggtaatccgtacccagcgctctgtttttccgctgattctgtagattccgttttcctccggcaccggacatctttgcatatccgacagcctggacagaaataccttctcatccacatacaaatgattctcgtcctcacatggaagttccataaggggaaagatctgttttgtgacctgtactccatatccgccgggactgtactcaaaggcaccgatatgaaggcccagaaggtccatgatttcagacattttaagtgtgttgtccagcagattctgattggatatctccactgcctgagacaacaaatccaattcctctatcccggtcctctccagcctgatttttctggtataatcaaaattccttactttggcggccagctttgccacaggttccgtgattttcctgctgatgaacccggcggccccggcacccagcaaaagggataccatcaatgtcactgcaaaaatctttatgatccggtgaagaaaaccatacagtgcatcccctctcattaatcccagaaccacccagttcccgctgtcatatggaacattctttgtgccgtataaatccaggctcttaatacagccgtatatcttttctcctgtaaggctggatacctgacagatagagtacgtttcgtcctcctgctttatcctgagcagcggttcatccccaaaaagcctgttctggtactcgcccttcttgaccagaacaaacagctcctgcgggttctcctgcattgcggcaaccatgtaccccggtgaatcctgggcagacaactcgttggcaggcagcagctttcttatatgctccagggatatctccaccccaatcacaccgtggacctggccaacgcggtcaaagagcggaacggtgtaggtgatgacaggcacatcctcaggtgtcatgtagaaaggccggctccagtatcccagcttttcataatccctggactggccggccgcctgaaacggcatatcaaaaaacttcctgttttcttcattcaatgacaggccgtaatgccaaacgctgtccagaggaatctggtatctcctggatatctctgcaggtcccattacctggaacaaatcactgttgtccgcgctgtatgtctccgggtcatagtccctgaaatacagagccggcatgctttttccctgccccggttcatccagtatcagaaatgtgcccgtggtaccgctgacatgcagcatggatataagggtatccgcagagccaatcagaaatgactccgcatccatttttccctccccatagccgctctcagacaatcggtcggacaattcctgtacatagggatgaatattggtccaccggttgtcaatctggtcctgaatggagctggccctgagggtcacagtggacgcaaatgactggtacgccgtatccctggtctgcttcaatattccgcccgctatcagcatccccagaaccagcagagactgaagaatcaccagacccgcagtaaaggcagagcattttgatgctatggactgcttttgtttcatattcctcatcagctccctaataatttagcggcattatcctgccacccttcataccattcctggaaatgggcctcatccgtgacctgggcctgggcctcttcctttgtcatgccggccttcatcttatcctcagcctccagacgggcattgtccacagaagcctccatatattcgccgtaaaactgtctcatctcatagcttccctcaaagggaggattggaataaaagcggtattcagagagcattttcagagtagcctctgcggaccctcctatcgtgggattatattccggcgtaccggaataggctgccatagccttggcatatccctggttcagggaactgttctccaccggcagataaccgctgttcaccgcaaaatccagattctgctcctcctgggtcagccatttcagaaatacggccgatgcatactcatgggtactgtcgctttgtgcaatagcgaatccggccccctggaccatggcgcacaagtccccgtcgcggaaacagggatatggaagaacactgctctcaatccggtagatttcattctgattcagggtcacttcctttggaaaataaacctcccctgcgctggagcctacataagccagtatatcccctgtcttttcatcatcagaacggaacttgcccagatttgcataatagccctttacgtagggcacatacagttcatcccacaaaatcctggccaggtcctggtcaaaggaaaacgtcacctggccgtcctgcagcttataaatatcatttcctgtctgcacggacgcaacaatgatgtagttggccaggctgtcaatgcccagaaatgccttgccccccgaccactcgtaataggccttggctgtctcagccaccccctcccaggtagaaagacggtccagccggacccctgtgtcccctgcaaacctgtcccagtccgtcttattcagaaacagattttccgtagagcgcacaacaggaagaattttaagcccataattcccgccgaagctgcagtcctgaagaaaatccgcccggtataccttcagctcatcctcggaaaaatattgattcaggtccacaagcttgcccaacacatcaatgcggtaggcattttccggatacgctgcaaacagattgggcatggcgtcagctcccagccttccgctggctgaattgtaagcctcctccgccagctggtttacatctccatagctgacactgtccacaataattcccatttccgtgcccagtgattcattgaatctggacaccagattgtcaaaggcctgttttgtctgcccgttataataattccataccgtaatcataaccggctgtttgggattcagctgatacctggcttcctcactgcgtgaacagccggctgccatccctactaacaggaataccgctgccgcccatgccagtattcctccctctctctttttcatacaaatcctcccattcctgacagactcagctcaccgcgtcccgtccttcccctgaatcaatcttcacactttccagactaccgtcatcccgcttttccacccgaaggacaaaggggaagatatcatgctttgtgcagagccagaaatcctcctgaggatagatttcctgggtatggggattaaagaaatgttcgccgccggctgtcttcagggaccgtatttcctcgtctataaggcagggtctgccctccagaagacatttgatataccgggcgcaaatcacatcctcccttgcagtcctttctcctccgtttcccatggctaccagggatactgtctccggctgtcttctgctgatataatcggcaactgccctggcattcaccaggcttccggtcagtatctcctctgcgtgtacggcattcacgattccctgtgttcccgcgcttgtagtatgtacgatttttttccctgacaagtccgcgtcccgggtctgggacggtgaatttccatagtcaaagccctcacacctgcggccccagcgctctccaatgagaagatattccggatgtacctgtttcatatgcctggcctcctccacgcttccggccgggaatacggcagacgccccccgggcatacagatagcactccagggaaaaagcccggaacacatctatgataacggttaatccctctgctttttttgctccttcaatcaattccaatattctgatttccatgctgttttccgccctattctcttgacctgctgtttgcttattgttggtttattgttttttccattatacagcatcccggggctaatgcaaagaaataaagttgtggaaatggaaccgggattcccggctgcccttctggatctcagccatcccgctctccaaagactcctatggtctgtgaatccgctccgggaaataggagtacaggcataaaaacgccaggaaaaccgcgcctaaaaacactgctgtataccggatggtactctccatatccaggacccggtcctgtgctgcctgtacggccacggtccagccataaggttccagacgtttatacaccacataggttccgtcctcaagaaggctgcccgtctcctgattcatggacgggagaagggacgccatactgtccgctgttttcccgctcccgtcggtatcaacacggtaaatgcatgctccgctatcatccataatataaaaggatgcgcctaatcccaaatctatatcggaaagcgcggagtgcagcctgcttacatccatgtccatataaaaatggcccagacagcttcctatggtctttaaggaggtgatatcctgataactgcgccggaaggtaataacctgactcccggaatcctgaaaataatcatccatatgggcgggcaggaccgaaaaatcccctttctcatcctctttcccggtccaataccggaacgcgtcctcatccagtaccttatacgcgttcctggtagcatagtaaatctgccctttccggtccttaaaataaacgctgcgcagcctgctgtccctgtccagaaaatcactcagaagaagggtaatttccattttcctttcctcccggccaagaccgggggattttaaaatctggtacaggaacattccatcatccgtggaaacgtcatagatatgctttgtcaggctgctgcattcctccaacaccgcctctgtattgctgcccccatagctcaccatgcgccctatgtcatccagcaccacacgttccatattgcttctgaaatgtcccgttaacgccgtgccggcagccagaagaggcaccaggcccagaatcacaaaggatgtggccagacgaatcaatctgtttacttttctctgcatcacggctcctcccagcgttccaacatattatctgccagggatgaaattgatgttccgccccacagcgtctcaaccagcatccggtcatagcattcaataaaaccatccggcggctgggcatccttaagcagaaactccgtatgcacaggacttccctcataagcagcctccatgattttcctgtccggcgtgtccggcatgttcacccggcggactgtcacagagttcccgttcatgatttccaatatggtttcatatacgccttcggaatagcagaactgaaggaaccgggcacacgcatccatcttttttccatccccggcagtcagcgacgaaatcccccactgcacacttctgtcgtccattgcatagacagtcccgttctttccgggaagaaagaagaagcccaggcggatctgaggattcaggttctctatctgctgcagcatctgaggccctgcatacaccatgaccgcctgccgggtggatatggccctggctgtctcacggtctgtcactgccctgtaccgggaattgatatatccccggctggccagatcacggaaatcccccagcatctccgctgccttttctttggtccagcaggcctgtccgtcccctgacgcaatgtagttgcagaacaggtaattcccccaatatttcatatgccggtcgccggcagctcccagggcaatggcatcatatcctgatgccttaagggtggcgcacacccgaagaaattcctcatatgtgcgaggtgcgcaaagtcccagccgttcaaatatctccgcattataaatcatccccagggtggtggtgtaaaggggaacaccatagcatatgccgccgcaggtaccgggattctccaccagcgaatacacttcctccggcatgggggccagaagccctgcctgtacaagggagtccgtctccctcagctccacgatatcgttaaactctccctgggcagccagcacttccagccgcctggcgtatgtctggttttctgcttccggcatgaaatacagctccaccttaatgtcctgattagatttcatgaaagcttctgccgcattctccattccgctcttccatctaatgtcccctgatgagcagaccacccgtattttcacctctgggtcctgacggctgacggacccagggggcgctgcggggctgcatcctgtcaccataaacaacagaccagccaaaagaaggatgctggctgacatcctgctcacggctggtctgctgtgggattttgtggtttcaaagctttcttcccgccaatttttcttttttctatccctggctctgcggccggttttctcttctgtactcatctgcacccttcccatatttccccctaaaaagctccctgcactgccggaccttcctgtatccagctgcttctgccgctttatatatcgttaccgccgcatattgacccggttcctgagtggttggctgtaatacggataaacgcatccatctcttttgtcagccacttattcctgttataaataacctgctgatacatggccagcctgatgtcagccacatcaagcacaaccagctccccacgttttacatattcctgcaccgcaaacaggggaagatatgatatgccccggttcttccttatcatccttatgatgaattccgtattgctgatttccaaaaagggagtgaggaccattccctgtgattccaggaaacaatccagctcccgcctgtaattttcattcttttccgtcaggaagaacggctcgtccatgatttcctccaggctgattaccctgttccccccaaggccgcaggagggagaagccacgaacacaatgggttcccggacttccatgaccttattccaattatcattataccttggccggtccagaatgtatatcaaatccagctggttcctctccatcatatcaatcagctggttgggcgtggaggcagtcaccttgaccggaaccctgggatggctgctgcgaaaggaattcagtatctggggaagctttgaaaaacacagggattccagtgttcccacatgaagggggctgcacagctcctcctcgctttttgcaaattccctggcacattttatatcccggataatttggttggcatggcccagaaactgcctgccgggcgctgtcaggtaaacccgtttccccatacggtcaaacagttttactcccagctcattttccaaaaggcgtatctgcacggtcagggctgactgggtatagcctaaaacctctgctgccctggaaaagctttcggtctgggtgatagtcacaaaggtctgcagctgtcttaactccatttaactacctcctgacaatctatgaatttaatttattatatatataaaattcatgaatttgatttatttatcctttatgatacaatgcacttacgcagatgtcaattacctgggttcaatcaaggataagcctctgcagtaccatctgcaaaaaaagaaaaggatgagattacatatggcatttatcagtatatttgacgtgttgggcccggaaatgatagggccctccagttcccacacagccggcgcatgctccattgccctgctggccgggaaaatggcggacagtcccattacacatgtggaatttaccctctaccagtcctttgcaaagacccataagggccatggaacagacctggcgctcctgggaggaatcatgggcttttccacagacgacagaaggataccccttgcatgttccgtggcagaagaacggggactctcctaccgtttcatcaccgatgacactgattcggacactcaccccaacacagtggatatccgcataacctgcttaaacgggcgcacttactcggtgcggggcgaatccctgggaggcgggaaggtacggatcagccgcattgaccatatagacgtggacttttccggcgagtacagcacactcatcatcatacaccgcgaccgcctgggtgtcctggcccatatcacccgctgtctcagcgagggatatgtaaacattgcctttatgaagctgttccgggaaacaaaaggagacagggcttacagcatcattgaatttgacggaagcctgccggaccatatggtatcacggatttacgaaaacccggatgtacaggatgttatgtttataccggtgaagggagaaaacgaaaatggattttaagaatgcaaaagagcttctggacttctgccaaaagctgaactgtcctatctcagatatcatgaaacagagggaatgcaccttggctgagaccagcctggaagatatatatgcaaagatggaccatgccctttccatcatgcgtgaatcagcctcttctcctatccaggaaccaaaaaaatccataggggggcttattggcggagaagccaggctggcagacctgcaccgggccagaggagccgccatctgcggcagcgttctctccagggcaatcacctattccatggccgtcctggagacaaatacatccatggggctcattgtggcggctcccacggccggatcctccggcattgtccccggcctgcttctggcactccaggaagaatacagcattcctgacagcagggtaatagatgctctgtttaatgccggcgccatcggttacctggccatgagaaacgccaccgtggcaggcgcggtgggcggctgccaggcagaggtgggggttgcctcggctatggccgcctcggctgccgtggagctcatgggaggaactgcaaaacagtgtctcaatgccgcctcgtcggttctcatgaacctgctgggcctggtgtgcgaccccctgggaggtctggtggaatgcccctgccagggcaggaacgccgctggcgccgctgttgcgctgaccgctgcggagctggccctgagcggcatccgccagctgattccttttgatgaaatgctcgcggccatgtaccgtgtgggaagacagctgtcccctgacctgcgcgaaacagcgctgggcggatgtgcggccacgcccacagggaaggcgctggggtgcagggcgtgtccatgcagtccgtaattatgccaactgtctcattttttggaatccttggaacacgggcctcccggtgtagaatttaggacactctatgccgcggagtacccggagggctccagctgcaaggccctccatctcaaactcaccgggaaatacacagaccggcgctatgaatttggtcatctgtgtgataatttctaccagatattgggaatgggccagacctcctgtcagcagtatgccgtccacttcaccgcacagcaccgcggcataggcgccaatatctttggcaatctggtaaccggtggtttcatagacaagttttgcatacatatcgccctcgccaatcctttgctccacctccagagcgtcagcggttcccagcaaatccgtccagccgccggtcttcatgattttatccatcagctccttttgcgtatacttgccggaaaagcacaattccaccaaagatgcggccggcaatgcgccggtcctggtaggggccattctcccctctcctctggttgaatcagccgtatccaccatcttccccttttcatgggcagttacagatattccgccgcccatatgtaccactaccacattaatatcctcgtaacatttccctaaccgggctgcataacgtgcggctacctctttctggtttagaggatgcccccggctggttctctggatatcccccagcccggtgagacgcgcctccaggcggaactcatcagtgctgctgggattgaccacaaagctgcggctgccaaactgtaagccgaagtccctggctatcataggacccagattacccggatgcttacttcctatccccatgcttccgtgccggtacataaggtcgtttacctcatacactccacctgtcatgggaagaagccctgtacaccgcccggaaaaggcatctgtttttctcaggtccacatggtgttcctccaatgcgctgagaatggtcttcttccggtagtccagctggtccacaatctcctggaattgtttcagttcgctgaccggatgggacacatttacggaaaagcgttttttatcattgtcaaacaccgcaaccttggtggatgtggatccggggttaactgcaataatctgatatacttcactcattagaaaagctcctttgttttagatgcaatcaatacgcctaatgcaatggaatataatttggactgaggcgaggcagccctggatgtcaggataatcgggacctttgcccccatcataactccggccttgtctgcaccggcaaaatactccatggccttgtttaacatatttcccgcctcaatatccggcaccaacagtatgtcggcacgaccggccacaggactgtcgacccctttatgttttgccgcctctattgaaaccgcgttatccagagccagaggaccgtccaccaggcagccgggaatatcaccctgtttattttgccgggccagctctttggcatccagtgtgcagggcattttaggattcaccttttccacggcacatagtacagcagctctaggcatctcattttcaagagcatgggcaacctccaccgcattctttaaaattgcggctttctgttccaatgtgggcgcgatattcatggcggaatcggtcacataaaacagacggtcaaatccagggacctgcattaccgccacatggctgattacaggactttttcttaggttgttttccttatccagtacggcgcgcatgattaacccagtatccaccatgcccttcattaacacatcggcctttttatctctgaccaattcagccgccttcatacaggctgattccttatccggtacatcaattacatctcccagctccaactcaattccggccttctgtgcaatatggatgatacctgttttatcacctaccagcaacggcttaacaagaccatgttctgcagccagatgcacagccgtcagaaccgcctcatcctgggctgctgcgactgccatgacaagcggccttgactgggctgcagtcctcaaaacatcacctaacgttttaatcatcacaaatcctcctctttcccggctcccttcccataatcccaccggcgcagcagcacagtacggaaaccaggatgcctaaatacaatgaatctataggcagggccagcagctttcccaccagcacagcggccggtgccaatacaattgccgtcagaacccatctcttgttaatatcgtatttcagccataaggcacagctcatgggaaccagcaccacggaccccctgagccccatggataaaaagcccaaatcattaatggtactgccgggaaccagggacgcaacacacgctgcggttacaaggatagccccaaggataccccgtgttgctgccagctcctttttttcatccatcctcttagtggtcatacgttgatagatgtccttgataagaatggtggccattcccagtgaaagtccggccccgccgcccaccgatgtaataagaagggtacccagcgcaatgcctgccaacaagggcggcatgtagtccagaacaaaagccggaaacacctgaatggtgctggttaataccggcaggtccggtattgccatgccggcagctttaagggtctctgcttctgcctgcagcatatagtgggaacgcatgaacagcccaatgcatataccagcgattcctaaaggcggaatcagcatagcgctaagcagcgccccccgtttcgccttccggtccgactccgcgctcaaaacagcctgggcataggtctgggtggacaaaactcccagcatcagcgacagaccggagccaatatccttcatggctccacgggcaaccagatttccatatcggtctgccaggtccgcagtatctttcaggttgctcacaccatttgcactctgctggaccagaccaagtccagtcccgcaaagctgctctatgagctccgaaaaaatcccacctatcccatggctgactgacagaacatagaccataccgaccagagaagctgcatacaacagcaccagctttacaatcccccccattccagcgccccaggcgcctccaaaaatcacataaaaacacatgataagaatagatgccagagccgctgcccaaacaggaatgtggggaaacagagtaatggccagaccagaacacgccaccacctgagccagcacactgataaatataccggtggagcacaatacagatcccaggcttccggcagccgcgccatatgatctggagataatctgtaactcagtgatacagccgctgtctcttaagggtctggcgtacatcacgccaagaatcaggcatccgattcccgcccccagggtgaaccaccaggcggccaggccgtaatggaaagcaagctgggctgtcccgaccgtggcctggctgctgaccaggcttcccataatggtaccgcagaccagaaaaggaccggcctttttgcctccatccacaaaatcactggcgccctttaccctttttccggaaaacaggcccacgcctacgataagaaacaggaccaatgcaatacctgccgctgtccagactgtcatgatacaaacgcctccttatctcattcaaccacacagtggtaccggcccgctgtggcacccgtccatatttcttcctatttcatatcctgtctcaaatgccctgatgtttaacgcaactgtcttttccccgcggctgccgaagaattccctgattgcgttcaagactccttctgctgtcaccaccttcagaactcctgccacgattcccaaagtcacaatattggccactgccgtattgcccagctccctggatatctttgtgatatctattccctgctgggaagcgctgtacgccgggtccgccgccacctcatcctgattataaataatcaggacttccggcccatacttgcctgcataccgctcataggctgtctgggccaggcagacaattatatccggttctgtcacatcgggaaaatatatctcctggtcactgataatgacatctgactttgcaaaggtcccccgggtttccacaccgtactcggatgaaagtgtagcctgtctgtggtcatgaagcacggctgcctgggccatcagggtcccgcacagaatcagtccctgtcctcctacaccgctaataattatctcattctgttttcccatcacgcttcccctcccttcaactcatcaatcacatgctggtaagcagtgctgtagtcttcctgttcccggttttccataatgccggtcacaaattttccttttagttcttcccgattcattgaacttgcctttgcatctgaaactgtgttttcttttatccattccatcatggcaggcgcctttcccaacttattagagcgtccgtaatgcgtagggcagggtgatatgacctccacaaaggaaaaccctttatgggacatggcctgttcaatcagacgttccagctggaccgcgtcaaccacagttcccctggccacaaaacttccgcctgccgccttcacaacatcgcagacatcaaaggattgttccacatgcccgtaaggagatgtctttgtaattgcgttctttggggtggtgcctgaatactgtccgccggtcattccatagtttaagttattgaccatgatggcagtcacatccacatttcggcgtgccgcatggatcagatggtttcctcctatggttatgccgtccccatcccccatcagtgtaagtacatgtaatctgggattagccagcttgattccggtggaaaatgccagagcccgtccatgggtgccatggaatgtgtttgtcttcacatagtcatccgccttgccccagcagccgataccagtggcaacgaccgtgtcctggcaggtccagcccagtctgtctatactgttcagaattgcatgtaatacaatgccgttcccgcagcctgcgcaccaaaaatgcggaagcttttcctctaataaaaaatcctgcagcattatcttgcaacctcctctattttcttcaagatgtcagccggttcaatgggctttccatccacacggtttacaccttccaccggaatatgtttcgggttcctcatacgtatttcaccaatgtactgtcccaggttcagctcaggaaccaccaccgcctcagcttgttccatagcttcccttatatccttttccgctatcggccagattgtgaccagctgcagaacaccaatgggtattccctgactgcggcctttcttcatggcctcaagagcggaacgtgctgagccgccataggcaatgatgacgtactgcgcgtccttcattgcatacttacgggtaatagcaatttcatcacggtgtgactcaatcttatctgatagatggcggatcatccggtctgcattgtccggtctggcacagggataccccatttcatcatgcatgcttccatttaccttaaatacatacttgcttccataagccgcaagaggcgccaacccctcagtatggtcatatggcttatacatctgcggcggacaatccggatgtctccgctccactaccttgatttcctccgggctgcggataatcacctgttccctcagatggccgataatctcatccgaaagaaatatgaccggagtgcggtactgctccgaataattaaaagctgtaatcatcaggtcaaagcaatcctgtaccgaggatggcgaaagcacaatcatggaatgatcgccgtgggtaccccagcgcgcctgcagtacatccccctgagccggtttggtggccagacctgtacttggacctgaacgctgtacatcaatgatgacacacggtatctcacccaacacagccacccccagattctcttgcataagcgacaagccgggaccactggtggcggtataagacttttttccggaacaggacgctccaatcagggctgccatgctgctgatctcgtcttccatctgtatatacaccccacccacctggggcaggcggatggacgaagtctcagccacctcagtagatggggtgattgggtagccggcgtaaaacctggcacctgcggcaattgctccctcagtcatcgtctcattgccctgcataaaccttaattctcccataatcatccctcctcaacctttactgcaaagtccggacagcgcagttcacaaagcctgcatccaatacagtcttcctgcctggccggatatggatacccattctcattcattttaaatacatgcctggggcagaacgctatacagattccacatgtcttgcaccatttctgatttattgtaatcgtactcaagttaaagcctccttttttatttcttgttttcattataggtgattgctttttatttgtaaaattgatataatagaaattataattcaaaaaaattgataaatagaggtgtgaatatggagtttcggaatctctatagctttctgcgcgtggtagaattaggaagctttacaaaagccgcccaggagctcggctatgcgcagtccaccataacgacgcagatcaagcagctggaagcagagatgggattttccctgtttgagcatgttggacgccgtgtctctttgactgtttacggccagcaggtcattccctatgtcaaccaaatccttcagattcaggagcagatatcctccatcagtctgacagcgccttctgaaatacatggaacactgaagattggtattgtggagtctatcatgaattccctgcttctgactaatattaaaaaatacagggaacgttttccaaatgtgataatccaaatttatcctgccgtcaccagacctctgtttgaaatgctgcgccgtaatgaagtggacctgatttttgccatgggtgaccaaatcagcatgtcggattgtgtgtgtgcctgcagccatgccgaatcctctgtgttcatcagtgcgccggagcaccccataacacagatgaagcaggtcactctggccaaagtccttgaggaacctatgattctcaccggtgagattactttcctgcgtcaggaacttaccaaaaaggcccgaagcctgggtatagagctatgccctgtaatccagactgaaagttccagcatcatcatcaacttagtacgccaaaatctcggcatatcgtttttaccggaacatcttgtccgctccgctttccttagcggaaaagtggcagttcttcccataacagattatgagctgccctttcatgtacacatttgttatcacaaaaacaaatatctaacgccgcagatggctggtctcatccaactgacccaggaatactggtctgaaatcgaccggttagatgatggggtccgccagcatccgtaatgcatcattccctttacgacaaaaagcaggaagccctgggttcttacgaccttcccgggcttccctcttcttttattcacaaacacactcttgtctacataagtgtataatctccctgttgtatccaacctttttttctcatgaactcggagataacaaaggatagcagggcaggaagaacaaaacaaatcaaagcaagtccaatccagtcctttaataccggtgagattgcagtctcattaatcaataccgctgcctggtctggtgagaaccagccagtcaccacaccgattggacccacaagtccgcatgttcccattccggatgagattggtgtaccattcattttcaggcgaaatacacaggttgctataggaccggtaatcatcccggtaattaaaggcggcagccacaaaacaggcttctttaaaatattcggcaacatgagcatggcagcgcctaatccaatggaagacagaccattaacacggttttcccggtaagaacatactgccagtcccaccatctgggcacagcatccggctaccgccgctcctccggccagccccacaaggctgagagctgcgcagattgcagcggaactgatgggcagcgtaagcgcaataccaacaatggttgccaccagcacccccataagcaggggctgctgttccgtagcccacataatcatatatcccactgcggatgcgccggctccaatgggaggcgctagaaaatttgccaccataacacctacaacaatggtgaccgttggagtaaccagaaggtccaccgctgtgcgttttgataccagctttccaaaaaaaattgcaatcagcgagacaaagtatactgccaacggaccgccggcaccgcccagtgcattggttgcaaatcccaccgtagccagggagaacaggacatatggcggacattgcagcgcgtaaccgatggccatagccatggcagctccctgcatctgccctgtatatccggatatccccttgcagaattcacccactgacccaggtatgaactttccgattgtaccaataattgtgccaatcagaagagaggcaaaaagtccctgagccattccgctcattgcctggataacaatgcggtcaaaggtgagttctatgttttgttcttttaaataggtttgaatgttacctgctgatgcctttgaatcttccaagatgattttcccccttctagtataaaagcctgtcttttagcgcagtaaaggtttcgcggatgcctgccagctgttctgggaatatttcactctttaccactgtttccatattacctgccgccgcctggactgttccccagggatcaatcaccatgctacggccgataaacgggttgccgcggctggcaccggcgcagcagcagctcagcatataacattggttttccattgcccgtaccggatgcagcatattccaactctccacacggggatatggccatcctgcgcagttaaccaatatttcagctcccatttccacctccttgcgaaagagctcaggaaagcggatgtcgtaacaaatactcatacctattttgccaaattcagtatcaataaccaccggcttgtcaccgcgttccatatactggcgttcggctgcgaaaagatgcatcttccggtatgtacccagcagtcttccctcccggtctatcaggccggctgtattataacacttatccccatcctgttcagaaatgcttcctgtaaagatataggatcccaattcttttgccttccttgccagactgctgaaggtgggaccggtaagcagctcactctgctttgcatattcctcataagcaaagaaaccaatattccacagttccggcaggacgataaggtcagttccctttaagttatccaggataccttccatacggataattttttgttccttactttcttcatcattaaccgcaaattgtacaattgcaactttcataccttacttttacctcctgagcccttctccggctgtatccgggcagattccctattcccttggtccacccaattttaatttgaggaggctgcattccggatcaatgggcttgccgggatcctggtaacggaattccattgttgtgcatcctagaggaatgctgtagggaccatgcagcattcctggaaggcgggaaccatagtagccttttgacatggtcaggttttttttggtatctgtcaggtacccatccacaacataaatctcttcacagaaatcatgggtcagtacttccggcatatctgtcttaggcggaaactttaagaggcgggtatagttgccagtctcagggtcatatgagagaatcttctccattgtcccattataaccgccctctaccaaacgccactctccaaataaatccacatccctgatttcatactcctgttttgccatagtaaaatcctcctttgatttttttatattattctcttatttctgactgaatcagtcgcccttataccaagaagagacacaattcagttcatatacattgttcagctttcttccaagaaccggatcctccagctcgctttcaaaatacaggctgtagtcagccttaaataatgctgcaacggttcctgagtaaataacaagtccttgtgtgtcatccggattcttaagaagcttttttacccgttccaaaagatccatcggatccagcatagctgtcagctttgcttcctggagaaccttcttatctccgttgtttattacccagcttcggattataatatcatcccagtggccagccacatcctccaaacgccaaagttcacggctaatggtatttggatagatttgcttggcctttggtatatccaccacttcaagcttgcggtccgtgtggtcgcttcccactcccacatagatggattccccgtcacagagaagtacgaattccacttctccggagtggtctgtctcatccagcacctcaaatgtcttctcctgtgtgattttaccggggagcttcacgaagtagaccggtgtcttgtcaggcgcaggaatgccttcttccttcagttcatcaatgtgagctttcacagcggcctggtccctgcccgtgtatcccgcattgataacgtacctctcctcaaactcgatggttccttcagtgccgtccttttccagaattttgaatttcaacataatcatcacctttccataaatttttactttatttttttaattttttataacttttgcactaactataatatgagtataacggttatattcagttttgtaaaattgatagttttgaatttataattcatttttttcgattgaacgcccccacctgcaagtacagatattgggtcaaatacattcaaaagccccgggagcgccaaactcccggggccttgcttttattaatattttacggtcgattctatcccacgtcagggtacgttcgagcacagcggccagctaccctttccgcctccatttcctcactaaacgcttcaccccactctctcctctgcgccctttcagcagccccactcccagattagcgctcagaagaattccggcagagcctgcaaaaacatacacgaaccgctttacgcgtccatgccggccgccggaagcagaagaaccgtccccttctcccccttcctgtccgtctccccctggtcctgtttcaacctttccggcattagcctggagcgcatcaccggcctcttccgtattgtctccgttttcatctccaggcatcccccgccttccatatgcgtctctgcccagtctgtttcgttccccaaaaagtccatcctcaggatggtctgatgcagacgcatccccttgcgttacccgggccgtttccgacctgtcagtatccggccggatgctgtccggctgccctgtggcaggaatgccaaaaccgcctccccacaccccggctcctcccggactgccctctcccataccagcctggtctcctgccatctctcctccgccggcgctatctaccccgccggcgccatttaccccgccgccgtttaccccgccggctccaggtcctcctgaggcattcccggaaaccacaccgccccttccggatgttccctgtccgcctccgcctctgttgcccccggaacttccgtcgctgtcagacgacggctttgtggcttccggcaccagactgacctggcattttaccggatcggaagtcacagtgcgcaccgcatccccatctcttacctttagctgggttttaaaccacatggcccggtttcctatgttgtatttaaaaataatataatcataggcctggccggaagcagcattttgttccaggtagttcgtatattccccatctttccctgtccatgctgccatctcatagctgacctggtcaaaactgtaataaagatacagtcccactgcattatcaggaattcccgcaatccgtatccgcatcactgcatagccgtccgcgtctgctgacagaatgtctgccgcttctattttcattgacgttctgctctgcaccgccacgtccagggatgcccgcagatcgcttgggttgcacaggttccggtctgtcagagcctccttggaataatttccccataccctatacacacccgcccggttaaaatccacggaggacaagtcccactgcaccggtagttctgcccactcatatttcccattgtccgcctgataaagcacaaggtcataagcaggatactcctcctttttcggcggttctccctccgcgcaggccacagtgggaacagtgctgtcgggatttggcagcagcggccttgccgcaggcacgtcctctccccagctttcgccgggcggatctgaggtttccggctctctattttcatccctgattcctcccgccagatgaaaacgggaggaaatctcgtattttcctcccgcttggaccaggatgtgatcggaatacaggctttcatatgtcccgccctgagacagagacagtctgcctccgctctccacggtcatgatttccttgtttcccataaaataaaggtccgggttatccactgtcaacctccctttattagcgatacggatggtaaaatccctggtgtttaattcccttctccggcctgcgttcccctgttccatccccagctccaccttaccgtctatcaccagatccgcggtaagaacggcgaatcctccattggcactgtctgattgataccaattcagtaaatcctccttgcctgcgattctcgcaatggcaatgggtcccgccagacagaaggacggtttacctgacagtatgcctgtgttcacgtctgatacggcgatgaaacatagtaagaccagaaccgcaatccatgtttttcttttcatgtctttcttttcactccggctccccctttgcaatttaaatcccaccaattcgccctgtctgtttccattttatcatcccggcttatttcaggcaatgtgattctgaaatggaaaaggcatggaatatcaggctgtcttggtgggaattatatgatatctgtaatgcattctcttacagatgcaggttcatctgattgtttccattctggaaacgatggctgtactggcgcaccatcctggagagcggcaccatggacagtgaatcagaacagcccataagcggcttaaatgcattgccgccataggtcactgtcaccaggcaggattcatccgcctcagacacctcagacacctcaaccgcaaagcccaaacgtatctcatcccccatacgccccaacagtgtctggacacacagttcctcaaagataagttcaatattgttgatatgcctctgggaaagaatctgcctgcgtccaaattcctcaatggccatattgatttcgatgtagtcaaaacgccgggatgtaatctcctgttcaaagacttcgagccctttgacaaaggccctggtacgctccttttttggatggccgaaaatctgttccggaggaccgtcctcatatagttctccctggtccatataaaagatgcgggaggaaacatcccggacaaatttcatctcatgggtaacaatcagcatggtgagcccttcccctgccagggcgcgtatgacggaaagcacctcacccgccatggcaggatccaggacggatgttggctcgtcaggaatgcttccgtgctcccggtaaattctacctgcacccgggcatcctgattcaccaggtcttgtactccaggcccccctaaaatggaagacggaccctctgccccttatacagccagtaaatcagcccatagagtaccaatggcatagccataccgatataatcataatctgactgaatcaacaggttgaacagggcatgcatggtgatggaaatggacagaagcccgaaggttccggtgtagaacagctttttttgttttttaacgtatgtgattccggttcccgccaccacggtgcacagtccgtgcatcaggctggcggagaagcctcttgccgtggcccacagtacggttaccgatcccacgttgtcaattaagatcatggaattttccagaatggcaaagcccacgcccaccgccatggcaatcgggagcaccctgtttctccggtcatccagtaaaaccgcgtacaaaagcaccggcattgccttgagcaattcctccgtcatgggcggaaccagctcggaaaagcttctggcgctcagtcctgtcatgggatacacgatggtattgatttcataggcggacagggctgtgacggtccccagaagcataaaacccactatgcagcgcgacctgttctccagcagcggaagcatcagaagcatggggatggtcaggcagagaaatattatataaaccatttgcgcacccccatttcggccattggcagcagcgtcataagaagcaccgacgacaggacagacccggccgcccggatatccaaaccagaacatgcaggggcctgtaaaaggacctgcaccatgcagaatacgatgacgcaggcattgtaagggcgcatcacccggatgattcccaaatccacatccggtaatatcaggtgcttgatggaaaaatacagggtcggggcaatgggcaggcataggagggcataggtcaggcaggccccggcccccagggtccgcaccgagtgggcaagcagcaccagcaccagaaggggaccggaggcagcagtcagcctgtatccccggtatctggcctcgccgccgtccgccagccggttgatagcgccatagtaggaggacagcaggaagaaataggttcccatgtaacccaatattcccacatgaaatccctccggttcatggccatagaccaatgcatagccggctgtgaacagggttcccagcagataactggccatggcgtagagaaggagcttaaaaaagaggggctgctttctgcggatacactcccatcccccgtagagtacgcacaccagggcggctgccagcttcaggccagtcacgaatgggcctccttcccggatcccggacctttctttttgagaattccccacataacagccattccgatgaacatgccgattatcatactggtggcaatgggcgctgtattcacagctcctccatgctgggaaaaaaggctctgtcccctggtaatgccctggaggggcttatacccgccctgaagggatgaggaggctccctggctgtaactgttatactctcccataagctcctgcatctttaccataagggactgaacctgtgcgccggttttttctatataatcctccaggccccgtataacagacttccactggtccgacgaatacagaaggccctggtttgacttggggtatgatatcttattggtatccatgtagaacttcatcgtatccggcatggcaatgctttttctggagctctctgcgcttttttgtatctgccgtgcctgggataaaaagctgcctgccctgttctgatcctcctgaatgcggtttatctcattcatatagggcgtcatggtatctttggtgctgttggccagctgtatctgtagcctggccaactcaagatttatattggaagaactgcctcccccagagtccgtgccacctgcccctaccatagccccggtcatggacgcgccccggctttctccttcctctgaatcaagccccggaccgcccacgtccatcggctttaaatcctccaccagcttctgcacatcctcccacggagcgccttcctgtattttgtccagtatatccccggaggcggcaatgcgttccgctatttcccttagaatctgatcctggtctgactgttccgacccgtaggcagtaaacgatatgagcgtcatggatgccatgcaggcaagcagacatttcctgatatttatcttcatattttatcttcctctctcatgacccttcttcctttgcccaatgggtcaaagacgtttcatcaatgtcaatatattacagccgtccctgtattcataaacaacatcatccatggacttcttcaccatgaggattcccagtccgccgatgtcccgttcctcagcggaaagggtggtgtctgcatccggcttggccaggggatcaaatggcttgccgctgtctaaaaactgaatggttacctgcaggggatttcctcccaccgcacaccgcaccgtggcctgcccgatttcggggtggtatgcataccgggcaatattgacatagatttcctccactgcaatggaaatctgcatctgaatcttcatggaaaccccctgttcctccaacgcctgttccacaaattcctgtacatgctccagttcctccaatgcggccggtaccgtcaactccatcatagcgctccctcctctgctggctgtccccttttttctgacagctttaacttttctgacagctttaacgcaagcatggttatatcgtcaaactggggcgcgtcccctgcaaaagcgtctatatccgcctttacagcaggaagaagttcttccggcgcagcgtcctcatgagcggcaagcacagataaaagccgttcttcaccgtagagttcattctccctgttggcggcctcggtgacgccgtctgtatagaggtacagcgtactgccgggagacaggtcaatttcacctgacttataccggattccctccattccggccagcacgaatcccggcctcagcttcatgtatccgaagctgcctcctgcctgacgcaccagcggcgggttatggcccgcattgacatagaccatgtgcccggtggcaatttccagaacccccatccatgcggtgacaaacagcccttcctcgttgctctcgcagagctgggcatttacctcgccgaatacctcagccggggtggcgcctgcctgggtgtggtccttgatcagcgtctttgcgatgaccataaacagggcagccggcacacctttgcccgacacgtccgcgatcaccactgccagatgtccctggtccaccagaaagaaatcataaaagtctccccccacctccttggccggctgcatggttgcatagatgtcaaattccgaccggtttgggaaggccgggaaaatgcccggcagcatgctggcctggatatgggtggccacgtccagttccgccccgatgcgttccttttccgctgtcacagctgacagattctcaatataactgtatagctcatgggccatgtggctgaaggcttcccccagctcctctatctcatccccggtctttacgtccacatggaaattagaaaggtcatccatctgttcgctgacaatggtcctcgccgcctgactcaggcggtttaagggccttaaaaccgactggcggataaagaaaaaatatcccacgataaagacaaggaggactgccaggatgaccagcaccaccgcggctgcgaagctccctatctgcctgttaatcatgtccatggaaatatccacgcaggacagggccactggccggcctgaagaatcccgaatagccacataggcggaagccagatagccgtactcctcattatctgttatgagaatggtgtcctcaccatccggatgcagataagcgccccgcatgatttccctgccgccctgataatagtcgtccacatcccccaggctgcatactccctcctcccctgtctttcccacatcccatatatagtacatatggtcctcgcaggggatgaccacgtaaaaatacttgatgcctatggtctccttcatatacaggagataacggcttacctggtcgtagtagctgtctgtctttcgtgtcagcgcatagtccttaatagtgtctccgtcaatatactccgcagctatcttagcctggtcaaaggccatcttggtgtaatatgattccatgctgcggcggtactgccgtgtgatgacaagacacagggttatcatcaggaccacggtcattgcaatcagtcctataaggaacttaagctgcagctttcctttttttctgcttctcatcacgcctattcctcccacaccggcaccaggtccagacgcagatgcccgtcagccacgccgtacagcaccctgttttcacggacaaacagattatggctgtcatcctgccccagaagcacgcttccagctgcaaatccatccacatagcaggaacgtccgtctatgcacaccgtagtcatcttattgaagcaccggtacaccccccgggcttcctccaccgtcatgccgtgattcagggccagcgcctccttcttgggacggttccagtagggaagcttctccttctggggcctggcatttgaccataccctgtcaaaatcctccatcagctcttttaccatggaaagggcctggcgtccgctctttaaataaatatccacgctgtcattacccggctgtatgtcatacttcctttgggccaggatgtccccccggtccagggactttgcaatcttatgcatggtcacgccgcttctccccagcccgcgctccatggcacactcgacgggatagtagctgcgcccctcaggaagcaaggagctgtgaatgttgacgccgtaaaaccggctgtcatccggcacaggaattttgtggctgtattccgccacaaaaaacaattcacagccctccttttccatataggagaacatctcatcttctgtgatctgtccataacagacaggtatgcctgacatgtgggcaagctggactatattatgctcattaaaatagtcctcctccatgtggtatgtatataacaccagaatttcatggttcagatgcaggtattcaaaaacgtccaaaaacacatctgacccaaaatatactattttcactttaaccttccttttttatccttcttaataatatccttcttatatatccttcttaatttataataataccgtcctgatttaccttgcagccgccaaccacggcattcactgccatggaaccgtcagcgttaaaataccgccagtgtccgtccacattcttccatccgccggagaacataacaccgtcgctgccgaaaaaatatattttcccgtcaatctgccgcagacccgtgtacatatatccccgcctgccgtcatacagcttgtgcagataataccattttccgccaatctcaatccatccgtccttcatataacccttaggatcgaaatagtaccagtcgtaatggccattgtaatacagatatgcccagccggcgcttggccatgtgccgttgctgtaggcgtaccaccatccggtgtcattctgcatccatcttccttccctgacagtacctgagtcatgttcagcctgtaccgctcctgctgtttcctctgtttcctgggtataagcgattgcgtaggttgaaaattcatccgctcttatggtcagtgtctgatgttcctcctgatacgtattgtccacagcagatactgttcccccatggaccttatatacaaagtagggcgccctgtttcttatttcctcagggagcggaatcacaatcgtgagttttttgcctttcaggtccggtacaggcgtctcatgatcccctgccgtcactccgacggcattttttacggtctttaacacctgcaaatccagatacatgcccacctgcccgccgggagccatctcctgggcaatgcgttctgcatcctgggccacttcatttctgggtttattctcgacccggagcttgaactccacagtaccgccgtccctgactacatctgcgtcagattgtgtatacaattcactgtgaaacaactcatttaatccgccggccacaacttccggagtatcctcagtggcaatctcaattatgctttgcgtctttcctatgctcatctgtataccggccacactgttcccgctttttatctccacaatctgcgtaacgcggtagtatccgttattagctaccagattgtagaatccgtcaggcagtccctcaaatttgaattgtcccggtgactgaaggggacctgccccggcctggaccgtattgccccgctccagcgttacataaatcaatgtatccgccataccgctgttgtccgtcacagtaccgcttatttcacccaggggaccgcttaaggcggcagtcctgaaacgtactaattgttcatgggtttttattcctcccccaccgttttcctcatatgatatctgcatcttcacctgataatccgtctccggatccagtcctgccagtgctgcttttacagagactgtttccatgtccgaatcctggctcagctcatggtttacaatctggtatccatcttctgttccggcctttttatagctcaccgtcacctcttttaacggtacattgcccagtaagatgatgccctccagcatggcgctgtttggggtgatatccttgggcgctgacaggctgagtacaggattgtgtactgactccactaaaaatccgcctggtatgacttccggcattacctggtaattgtccgcatctccattgacctgaatctgcgtgattcttatatcatagcttcccgccggggcctcctttgcattgccctcgctggaaacaataagcgctgacctgatggatgcttttacagcatctgtaaggccttcatctcccggccatgtaactataaagccgctgtcgccaatgggatccgactgatatactttgcgccctgatactgttatggaaaccggcttaggtttgatgatataagatatggcagtgacagaatcctccgtcagctcatatttttgcgcaccgctctccgtaagcgcgaatacggcagtataagagcctgcgctgacaggcgcatggccgaccggtacggactgcccgctgtctgtggtccgggtataatttacggtgtaatcttcttccgtcaggtccgccccagcagaaacagcagaagctgccttttcctcccctgaataaaccagaccggaaggcgctgacagggtaaccgttacatccactatcggcgcagcaccgtcgatacccgctgtaatctgtccgttttcaacgactatttctcttgttacagcctcgctgatagcgcccgagtcattcataatccatacattaacaatgtaggtaccgtcatccgggaactcggcttccccaatcacccctgtgatggtcttctcgctgccgtcagccagtacactggccagattcctctcctcctgctggggcttcccgtcctttttaatggtatagtaaatggaatcagtccgccctgctttatccgtaaccctggcatctaccttaatgctcttttttccttctgcctccagcgtaaagctgaacgggtcttttgaaagtacaggcgggtccgcaatttcccccactgagaaaagaacagaacgcgtaatacgttcgcccggggagagctccatatctttccatgagaaggccaggccgctgtcacttccgattagatcgtctgcactggtatcgttaaattgattactctgtctgtcgctatagtatccaaaccacatggtagatatatcatccgcccccggcgcctttttacatgccagtgaaaactgctgctgactgcctggatcctccatcctaaatcccgttccggttctgtaaatagatgctgcgtcattgcttccaatctgaatatctgcatttaccccaatacatacccgttccatagtcttatctgatacatttaccagggtatgagtcaccttcagatattttccgtcgctcacaaaatcagcggaaatccctgctgccaatatctctcctgatttcagctcaacaaaaactggttcacgttccaaatttttaatggacgtgcagtccgaaaattttgtaggttccttacctgtgcagacccccaggtaatatccgttgttactgtaggtggtttgtacattcttaccatcttttattccatgtacatcgtaattgtctgctgatgcagaaagccggaatgatagaacaccattctctgtctccacaggttccagctcatggctcaggtctgaagaaaatgtgactttgatacggggatactcactcttgcatacatcatacaacgctctgcccagttccaattgatccgttctgataataacagaaccggatcctgtgatactatttgcaatcccctcaggaacccctgtattccggggcagagaaaccaccagcctgctgccggtccccagtgcattgctcccaatagaggttacactctccggcacggttaattcatgtaactgtccacatgcgttaaatgcattttgacctatacgtgccgcctgacccaattccacagaacaaatggtcttcggaaagatggaaccagacgaaacgtccggcatatctgctatcttttctttttctactgaatcactcataataaatgtctggagtgataccatattccgcagataatgccaatcgctttccgaaaaagtacctcccaaaatctccagggaatgaatattgtcagaagtctgatccttcaaagcgtcttccagtcccgttccagtcagttccataccgccatcaaccctgatgttaataacctgttcctctattgtattcaccagtttcatattgctgaaaaatgtgtccaggtccatcagcttccggttcagctccgaatcaaattcatccttctcatcctggctgagcgcatcatatgccttctttgcttctttctcctgctccattattccttggatatcgggaatctgggatgccgtggccacacttatccgctcaaccaactccactatttcctccgctgacggaagcgcttggattttctcataaacagattccatggcggaagtagggtatataatcacagcatctgtaatttctataaaaatcattggctgctctgtatccgtatccatatcataacggctgcttataacgggtatgtagcaataggtggttcctgcttcatcctcgggggagtaagcgtattctccctcatccggttcccacgccttcaccgttatctcagtccactggttatccgtttcttctgtgttactgttctctgtattcccggactctgtattcccgtcttttacatttaccttttccgctgcggtctctgtatatgcttcaatacttcccgttttaccgtcattctcagtaacatccgcacctgtatctgcattctccggcagacctgcccatggtaccatccggcccataatctcaatagaatctccaaaattattattatccgtactgtcatagccatcagcattgccggtagatgtagatatggaagccccggaatcatcagagctgccactatctgctgatgcgccatgtgatgtatcctggttgccttccggcaccgctccttctgacgaactcttgttcccttccggcttttctcctcccgacggactctggtctccttccggtgtctcaccttctgacggcccctggttctctcccggagcctctccctccgacggattctgattctctcccggcttctcatcttccgacggcccctgattctctcccggcttctcaccttccgacggcccctggttctctcccggtgtctcaccttccgacggcccctgattctctcccggcatctcactttccgacggcccctggttctctcccggcttctcaccttccgacggcccctggttctctcccggcttctcaccttctgacggcccctggttctctcccggagtctccccctcccacggattctggggctctcccggcttctctccctccgacggattcaggttaccttcgggcatctccccctctgacggtttctggatcccatccggtacggctggtgttacggctgacgttggctgttccggtttttgttcctcagcatcatcccggtatgtctttaccatcaaagtatcaggaaacagcttttcaaatacctcctggctggttccttcaggcaccttcatggaggagagttcctccggcagttcctggaactcggaaataattattttctttccttcttctttttcaccctctgccaggcctgttatctgaatgctgctgctcattaccataatggccatcaccaaactaatagctcgtttctttctgttgtaaatacgcatcgcggctctccctatcatttaagtctgattacagaatacatggtttccaatcacgcactgtatatgtccattttccttttccagggaaaaatacatggtcttaaaaggcagaatctgtgtttccccatccaacactgcttttacattccgtttcacacgctccgaaggtttcgcagcgtccatattcctgttcttccatgtgacgaactgactgcacccattgtctttctggctgagcacctcataaaccgtatcaggaaactggtcggaatacatccggttcagaattacctccactacagcctgctgtcccctgtccggttccgcgcctgcctccagcatggtgattcttgcaatcatgtccagctctatctcatcaagctgtattccccacctgttttgtggacctcctttgtttcccgcaggtttctctcttttcttttgtaattctccttttgctatagagcaaattgtctccggaacacggatcccggtcaccattttcccatattggccattcacatccgccccgtccagcccaaacaccgtcatagcatgaattgtgaatgacaaaatcactatgaaaaacagattgactcccacaaactttttcatcggttattcccccggtattctgtcttttgtatgtttcaccggcccgaagacctatattttcaccaccagagaattaaaaccgccgtaacgccggtaaaagaactcctttgccttactcttgataaccctcactcccatggcatccatatcaaaaccgccttcctggctgacacggcccgtctccagggcaaaggggtcaaaatatcttgcagtgtcccggatatggaggacaaattccccctgctgcccggccaccagtgtaatctcgatgcatacgtcatccccgcctccgtcccgcagaattacaacacataattcttcgatggtcatggtcacgtaatacgtctgtctgggactggcctcccatttttcacaaaatgccccggcctcccctgtgaccagggtcatatcctggtttccctggttgaccgtgcaggtgtaaaccctggatccgtcaaattcctccgtcctgccccggcccgctaaaaaccgtattatccacaatcccagtgaaagtacctcaacagccgggaacatccaccagaacaggtccattctcaggaatgagaagaacaatacgccgggtatcagcacgatggcgccccgcagcgacgaaatgataaggctctcccgctcctgattacaggactggaaatatccggccaaaagaatggatataccggcaaacaccgtacctgcgcagtaaagcctgagggctcctgcccccatggcggcagccgctgcctcacgcagcccgaacaggacacatatgaattggggaaacaggaaaatcaaaagagctgccaggcatcccgcgctgcatccataccgaaaggcgtatctgcgcacattcctcattccctccccgcggtgctctccgcaataggtgctcaccatgggctgcatagccctggtggttccctcgtaaagatagagaatcagataggaggcattctgcagcatgtcaaaaacagctacagacgcctcattcccggcacggattaggatgttattgcacagcagcaggaaaataagctggtacagatactggacggaactggaacatccgtctttaaaggccctggctgcggcccccggcgcaggacggacaggccggaattttagtatatgccttcctcccaggatacatggcagatagcacaggatggcaactgcctggccaatcatggtggacaaggctgctcccgctgtgccgtatcccagtatcagcacaaacaggatattgaagccgatatcagtaaggttgcctgcaaccgaaccaagaccggctatcttctcattgtcatcattacgcagatagtaattgagaatattagacatataaaaaagaggtgtggctgaaaccagcaccgccaggtagcttctggtggcttcaaagagcggtccgtcatccggcacagtgcccaggacagccagaaacggcgtcatgaaaacatttcctagtattcctgtgaggatactaaatgccagagcccctgtcaccacctggttaaagctgtccactgcctccccgggctttccctcccccaaaagcctggagtacctgacagaacctcccagccccagcccatgggcaaacatgcagttaatcatgtaaaccggaagaatcagcgcgatggcagccagacccacggctcccattctctggcccaccacaaccgcgtccgcaatatcactgagcgcccatcctgcggaggaaatgatggcgggtccccacatgcgccggaatattctgcctgtaaagcggtccctgtttttcatttccctttttccactcccttttctctcattcaatggtcaggatatccgtaaatcctgtgacctcaaatacttccatgattgtcccgcacacattgcgtaccgtcatggttccctgcctgttcatctgcttctgggccgccagaatcacccgcaggccggcggaagacaggtatgccaggccttccatatcaagcaccagtctgtccacaccctctaatccgtttttaatcacagtctccagctccggtgctgttgtggtatccagacgtccctccagctccagagtcaggcagccgttattttttgtggttgtaattttcattatcatttcctccctgtcattcttcattcttcataaaaccgaacctggtatccactctgttttccatacagcggcagatactgctgcgtatatggagctttgtggatttacggaagtcggcatacctgcagtaccagcactcccgcacagcaggcatgctccggctggtcccggtaaaatacggacagctgtaatcctctgtcacaatcgggtagccgtcatctgtcacgccaatcaccgctccccggattttcttttccgacatggccgcacactcctctttcataaacatgatttgcagccaaatgagaaacagcatcatctgaccacggaacaaacatatcacagcctttaaaaggaatgagggatgcaggacaaaaaacggtttttccgggataattgacaccggactgcacacccctgcctttaacacggtgtggcttccttccattccagggccagtaccaccttgaccgtgaattcatcatcggtgtggctgaccgcacagtagccgtggtggcgctccgccacatgccggatactgtccagtcccagtccgtgtccgtgttcctcttttagggtaaccagccggtccccatcccattttacccttccgtcatagctgtttcttatttccataatcaggttatgccctaccaggcgggccagcagcgagatataccgtccggctccacggccctggcgttggcatgcctccacggcgttctgcatggcattgcccagcaccgtgcacaaatccacgggagtacagggcaggtcaggaggaatctgggcgtcgcaattgaacctgatccccccgtttctggcctgttccccgtaatattttaaaagaatattggccgcatggtccccgcagtaatacaacccgtccatgtccggcatctgttcaacaagggcatccaggtactccttcagacggtcatagtccccggcctgggcgtatccgctcatcacccgcagatggtgcaggatgtcatgctgcatcctgcgcacctcatctatatggcctgccaggaaggcataatactgttccaactgtctcttatctgcagacataacaaatcttcctcctgtactaaatacgggtcagctcagcccgttccagcagatatccgaaatacgcgtcccggattgcgcggctgccccgctgccgtataggaatatgggccccggacatcatcaggaaatcctcctccgctactctcacccggttcatattcacaataaagctttggtggcaccgcaggaatccgtgtcccttcagctccttttccacatcgtccagttttgcgtatacccggtactcctctccgttttccagaaataccagaagcacattcctgcggctctctatgtattcaatctcccggtaggcaatcctgcggcccctgcatccctttttgagcagaagtgttttctggtttccctcgtattcctcctgcaaaaaacgtctgagcagggctgccgtcttctttccgtccaagggtttgacaaggtatccgtaggcatacacatcataactctccagggcatatgccggagtagttgtcaggaacacaatggacacatggggcgcgtaccgccgcagacagcgggcagcctccattcccagcatgccgtccatgaaaatatccataaaaataagatcaaaatcaacggaaccgtcatcgtaatcatccaccatagtttcgccgcggctgtattctgccaatgtatactcgtagggtacggccgcaaaaaaggagcgcaggaaaccctttaccatatccctttctgatttcaggtcgtcacatattgcaatacgaagcatgatcatccatcctctttttgtatcttaacgatgtattttaccataatatggtctgtatacctgattatgggataaatgacggatttttttgtataaatggcatattatgtccctattccgtcactctctgcacaaaaccagacagattctaatgccgattttatcagaaagattccagttcatgtggaatcccggccactcttaaccaaaatgtaacctttttcccggaccgctcccggaatatatggtatactgttattgagtacagctcgaataacaggcatctgacgggaggaagggaccatgccgtatcttttgtttgtggacgatgattccaatgtgttaaatataaaccgtaattactttgaatccaggggcttttccgtatccgtggcccagacagcggaccaggccctggaccatgtgaaaaagtatccggtagactgtgtggtgctggatattatgatgccgggctttgatgggttcctgctctgccgccgctttaaaacccagatgacagcacctgtgattttcctcaccagcctgacagaaaaagaatatttatatcagggcttttccctgggcggagatgattttctcaccaagccctgggaccttaaggagctggagatgcggatccggaccagaatcagccagtgttccaaccgttcccttaagggtgaacggctggaattcccgcctttaaccattgacgccggcacccgccaggcgtccatagggaatgtctgtgttccgctgaccgcctatgagttcgacatattactgctgctggcccgttctccgggccatgtcttttccccggactccatttaccgtgaaatctggaaactgcctgatttggacaacacccagaccgtcaaggtgcatgtggcccgtatgcggcataaaatggaagctgcctgcccgggacacagcttcatcggaaccgtgtggaagcaggggtaccgtttcctgccggaaaacagctgagagtaatcgtgagaggcggtgaaaagccatgacgcagtacaggaattcaaaatggctcaatttaacggcagcggcagccctgcttctggctgtccttattctgttccagttcctgtatcagaaagataacaaatacacaaacgggcctccctatggaagtcagggtgtctttgcattctccgcccgtgacctgacaggcagcaggcccctgtttcttattgacggatgggaattctatccggaccagctgctgacacctgataccgttggttctgttccggaccaatccatgtccttcatattcatcggacagtattccaacttttccttcctctcctccggccattcgccctttggcagggccacctaccgcctgctgctgcgatatgacggagaaccaaggcttctgaccctggaagtgccggagctgtttacggattatcaactttggataaacggacagccagtggaacagggcagcccctttgcaaccttttacatggacggcaccgccgaaattttgttaaacacagacaaccgcagccactattacagcggtctgacctatccccctgcccttggcacccctgaggctgtccacaggatgttatttctgcgccatatgttctacggcatactgtgtatctttcccctggccctgtgcctttacgcggccgctgcctggagaatacgggacagggacaggcgcctgctgcatttcggcttattatgcctgttcttttccatccactgcgcttatccgttcattcaccagctgggcctgtccggaaggctctggtatgctgtggaggatgtctcctggatggctatgctgtatgaggtcatggtactttcctccgtggaagccggtttcagcggaaaactgtggtacaggagattcctccgcccggctgcggctgcggcctgtgccgtatgcggcctgtctgtcctcttcctcatacctgcctccccccgcctggtgaatctttacggcgccttcctggacggatacaagcttcttatctggctctatctgctggaatgtgcggtatacggcctgtggatgaaccgggacagcgcgggcctggtgctggccggatgtttaaccatgggggccgccatggtgtccaatcttctggacaataaccagttcgagcctgtttatacgggatggcagacggaatacagcggctttatcctggtcatcgttttctggattctcacggtccggcacataagccgggtcctgaagcagaaccaggccctcaccgagcacctggaggaccaggtacagaagcgcaccagggagctccatgcggtgctggatgaacgcaaggcatttttctcggacctggcccacaacctgaaggcgcccgtggtggccattcacggatttacggatttgattctcaggggaaatttgtatctggatgatgatttgaaggaatatctggataaaatcagcagtgaaaatgaagaactatgcagacgcatgtacgtactgggagacttaaatgcttttgataagattacggagccaagggaattaatagaaataaacggcttgctgtcccaggtcagtcacgataatgaacctgaggcctgcatatccggtatagaactgcgggtggaaaaactggaagaccaggcatttatcctggcgcagaagagaaagctgctgctgctttttgagaacctgatttacaatgccatatcattcacgccggaggacggcgttatcaccatttccccctgcctggaccaggacggcgtgacgatacgggtaagcgatacaggtatggggattgagcctgagcatcttccccatatctttgaacgtttttattcaggacggcccgatgcctcagaaagcagcggattggggctctacattgcccgtatcacagtggaagaactgggcgggagtattcacgcggaatctgtgaaaggacagggaagcgtgttcacggtacagattcccctggcggggacagtcccttccctatagatccttccctacagatccttccttatagtcccttccctatgaaatgataagccggatgtttttgctttatatttcccgcagaagctctcccagcctgcggatcccctcatcaatcatgctgcagtccgcgttcgtaaagttaaggcgcatggtgttggtatcagtcatattgatgtaaaacggatcaccgggaacaaacgcaacctttttctccagggctttgggaaacagcgataaggcgctgaccccttccggcagtgtcacccataagaacatgcctccgcggggacgggtgtacctgactgtctccggaaaataccggtccatcgcctctgtcatagcctgtgcctgctccttatacagctgcctgatttggtcgatatgggcgtcatagtcgttgtgcatcagataatcccatatcaggtattgggagaagatatttgtatgtaaatcactggcttcttttgccaccgaaatatgtttcagaagttccgtgtcagcgcaaatcataaagccggttcgcatgcccggggtcactgtctttgaaaatgtccccagcagaatgctgcccggcagctggcctgccccgatataaggaatgcggccgccctcgtcaaagcgcagttccccataagggtcgtcctccaccaaaatgatttcccgctccctcagaacctcgcggatacacgctctgttttcagcacaatagctgagtcctgtggggttctggaagtccggaatggcatatataaatttgacatcatgtttcagagcatcttttaactgttctatatccatcccttcctctgtcagctcaaccggataaaataccggctgatattgggaaaatgcctgtatggccccaagataactgggcttttccacaatcactccgtcccctgtgtttaacaggaccttggatataaggtccagggcctgctgggaccctgtggtaatcaggatattttcaatgccaagtttcaggccgaatctgcggttgtagcggtccgctatatactggcgcagttccgggagtccggccgtgatggaatattggaacaggctgctcccataatcccttacaatgcgctccatggataccagaagttcctcctggggaaatgataccgggtttggcagtcctcctgcaaatgagatgatttgcgggtcagccgcggtttttagaatacttcggatgaatgacggtggtgtggatttaatccgctcagataataaatgttccatactgctgctcctttgtccattttctttatagtggtttatataatggtatcattataaacttgcaaaaggactcgaacaacagtagaattgtatgcaagacaattttgcaaatacccatacaaacaaaccacagagatcatacagaggaaacagattatgtctatcaattcatttgacaattatcccatgagctggaaaccggatttaagcagaacatcaggcccaaaatatctggcgctggtaagcctgatggaagaagatattaagaacggaacactgaaagcaggaacaaagctgccgccccagagagaattggcggattacctgaatgtaaacctaagcaccatatccagggcctttaaattgtgcggccagaagggccttctgtctgcctccgtaggaaacggtacctacgtctgtgcggatgtctctgcggagaccatacttctgtgcggacgtgagaatccgcggatgattgaaatgggcgcactggtcccccaggtgtccgggaaccggctggtcaaaacccacacagagcggctgttaaagcggcctgacgccctgaacctcttttcctacgatgacccggagggaacaggacggcagcgtgaagccggcgtggcctggcttcaaaaatcaggcttttctaccgataaggaccatgttctgctggcagcaggcggtcagaacgcactgacagcggcactgggcgcattgctggaacgcggggataagctgggaacagaccccctgacttatccgggtgttaaaaccgcggccaagcttctgggaatccatctgatacccattcagaatcatgattatgagatgacagaggaagggatccggtatgccgtacaaaatgaaaagataaaaggcatctatgtaattccggattaccacaatcccacctcgcatatcatgtccctggagacaaggaaaaggattgcagaactggccagggagaaacatatcctggtaattgaggacggaatcaacaacctgctgacggaaaatcccctgcctcccattgcttcttttgccccggaacaggtcatctatctgtcaagcctgtccaaaaccattgccgccgggttgagaactgcttttgtccatgtgccggaccagtatcaccgctgcctggccaccaccctttattccatgaatatttccatctccccgctgcttgcagctgtatccgcgggactgattgcagatgggactgcagatgaaattataaggggacggaaggaggaactgcgcaggcgcaatcatataatcagccaatccttaaaaggctttgcactggactgcccgcctaccagccccatgagatacctgcgcctgccggattattttaccggcaaaagctttgaaatctgcgcaaaacaggccggggtacaggtctatggggctgaacggttttcagttggcaataaaccggcggaaaaggcagtccgcatttccgtcataaccccgccgtccataggggatttggaggaagggattagacggttgagggggattctggggtgagccgtatcagtcttttcctggcgccatcatatactctgatctgagaacattggcctgtcaagcttgggattcactatggggtaatcctcccgatagtgagcccccctgctttcctgtcttctcaatgcggcctcccccataagacgtgaagctgtaatcagacaatacagccggaaggcttccatattaattgcatcctgcctgggagactctgcaagctgccgtccaatccgctccacagtgccaagtacctgcataagaccggcttcatttctgctgattaaaagatgatgctggtttaccgactgcagttcatggattaaaccttgtgtgtccgcctttctgtgtagtatttcccacaatctgtcatccgggtacatggcagcactttctctctgcggacggtggatacctgcccactttgcggcatttgtccccgctattttcccaaacacctggcaggtcaccatcatattcccgcccaggcggtccgctccatgaggaccgcctgccacttctccagccgcatacagtcccggcagcgatgtgctgccttctgcatcaatgcatacccccccgttaatagcatgggcaaatacattaatctccaccttctgcgttaacagatccacccccttgtccttcatatggttgcgagccaccggccacatgtgatggagtccgcagtcatccggtacatgacagatataatcatctttcatatgtcttaaatcagcaatgatacctccatggcgtcctcctctaccggctctgatttccttttgaattgctatttctaaatattttgaatcatcactggatgaaaacgggaagtgttttctatgttcatccatcacatattccggccgcatagaatctggtatgtacttttcaaggaaactctctccctccgaattagtcagtagaggatgggctgcccagatatatccgttaaatatattcataagagggtgtgaaaatccgattccgctctgcatgaattccatattaaccaatctggcacctgattcgtatgccagcatatatccgtctccgctgacatcccccggattcaggtttttttcaaaagcctgggatgcgcctccggatgccagaatgactgctcctgcagagatatagattagcttcccccgcgaatccaccccccatgctccgcagcatattccattcttcttcgccagctctatgatagtaactcctgtcagggactgaatatctggacatctgcgtatctgccggatcaatgcctgtacaattggttctccatggccccgtatgacatgtgtacggggaatgcttgcaaaacaacttttaaatgtataatatccgtccccttccctgtcaaattcgaccccccatgattcaagttcatcaattgtctcaggtgctccttcagccaggattgcagccagcttttcatccgccattccctgtccggcagccattatatcctggtaatgacattccacatctcccggcacatggggatcccctgcgttatatccggccatctctgccacaggatatgtagtggccccgcctaatccaagcggcattttagcagctatgattacatcagctcctgcgtcgcaggctgctaaggctgcccttaaggccgcccctcctcctcctataaccagtacatctgtcaccaatctgtccattttcagttcctctctgcctatatgattatctgaactgcggggaacgtttgccaaggaacgcatctaccccttctttacagtcctctgttttgaatatgctccggctaaattccaggtttttatagaaacatttatctgaggataccatgccgatttcccgtacccccttctttatcagcttgatagcttcaaacggtttatgagcgattctttcagccaggtcaagcgcagcactgactgtcttgccggccggagccagtcggttgaccagtccgagacgcagacagtcctctgcatcaatgaattctcctaaaaacatcatctccatggctttggaagcaccaactaatttaggcagtctgaaaattcctccgcttcccggaaaaacccccagattaatctctggctgtgcaattcttccgctttcggaaagaattctcaggtcgcaggccattgccatctcgtagccgccgccgcatacatttccttccatggcagcgataaccggcttatccagaaattcaattgcattgaatacttcattctccttctgcagcttttttccaattacatcatcccaaaccagaggaaattcctttacatcagaacctacgcaaaaggctttttctccagagccagtaagcaccaccacccgtacttcatcatcctgttccaatcggaacagcgtttcctttaactcgcggctaagttccagggtcaccaaattaagcggcggattatttaaagtaattagcgctaccttatctgctggtttctctactaaaatcaggttgttttcatactccatatcaattcttcctttcatgatttctaacaatcagtccctttctctctaactggtttaattcccgctgggtatacccggctttttctaatatctcgtctgtgtgctggccaaaagccgggggcagattacggactgccggacgtacgccgtcgtaataattggcatgccctaatccccgcagagtcctgccctcactttcccccagctctataaacggccgattataaagaatctggtcatccttcattacctgctcatactcatttaccggagcaaaccacatatcctccatgcgttcaaatatctccacccactgcgctgttgtctttttctgcatttcctgatttatcatctggtcaaattccacgcgtctctccatggcatcctgttccgtaaagttctctataacaccaggagtaaataagctgcacagccggtcatgatgtgtcaaggatactgttatgcatccgtccgccgtaggatataccccatatggggactgatgtatcctggtggacaagccggtatctgcccggtcaataaatctccctccatttaaataataaccaattgtttcaatctgcaaatccagggaagcagacagcagactggtctcaaccttatgcccttgtcctgttatgttcctgtggcgggctgctgcaataattcccaaagctataagtactgccgcatgctgttcaatgagggctgcccctgccggaacaggcggttttgaacctggaccgttcaaagaggccagtccgcttttcgcctccatcagcagttcatcatccggattctggcagcatccgctgccatccgctgtacagatgcaccatataagctgtttgtgagacctgagcaattcatcatattggatgccccacccctccagcagtccaggaggagaattatccagtacaatatcatagtcctgcagcaggcggtgtaatatatcaatgccttccggtgactgcggattgaaggaaatactcttctgattccggcctgtcatctgaaaaaacagaccgttttccccatccagaacacttccaggccggatacggcctgtcatatcccattccacccgcacaacctcggctcccagatcagccagtatctgactggctgaaccgccataaagcccatggacaaagctgagtatcttcataccctccaacatcatagaatcctcccgattaagtctgcttcatcacagcagcagcgtacttaatgcagggacaaatacaatcaggaaaaacaccgctgtatatcccagaaaaaagggaagctcacctttggctatatcacccatttttaattttgagacagaggctgccgcaaacagatttactgccacaggaggagtcatacatccaataacattcgctatacacataatcattccaaaatgaatgacgccaattcccagggtctgtgctatgggccagagaaccggtaccagaagcacacaggtagctatcccctccaggaatgtgccgaacacaagcaataccagggcaacaatcagacagaacatccatggagccagattcatggccacaattgcatccaccagctgtcctgatatccccgagaatgtaaacagccatgaaaatgctgtggaggttgcaatgatgaataaaatcatggcactgctctttcctgaggccagaagtatacggtaaatatcccggggatgcagttcccggtaaacaaaaacacttacaataaaagaatagataactgcaacggccgctgactcagtgggcgtcataagcccggaatatatacctcccaaaataacaaacggaagaaaaagggcaggcagtgcatggataaaatgttttgcaagctggctgacgcttgtcctctccgtatttttaggccacttctccttattggaatagtagatgcagattaccaccagtacaatggaaatcataagtcctgctacaattccccccttaaacatatcccctaccgaactgttggtaatggtacagtaaaccaccataataatggaaggaggaataatgggacccagccccccggacactgtcagcaatcctgcacaccgttcttttggatagcccagacgcaccatatcaggataaagcattccgccgattgccagcaccgtggccggcgccgaacctgacagagcggcaaaaaaagcgcaggccagtaccattgcgtaccccattccccctcgtatattacctataatactgttgcagaaatccaccagacggcgggatattccaccttctgtcataagatttcccgccagcacaaaaaggggaatcgccataatggatactgaatccagggcagtaaacattcgctggggcaccactgccataggaacgtcaaagcacagcagagacgccatggtcgccgctcccaaagaaaccgaaataggcacaccgattatcagtaacacaatcatggttccgaacaaaattattgcagtcatgacgcatcctcctttccttggtcttccgccgctttttccataaccaggcaaaccagcgctgctgcctgtattacggtaatgattccaaagctgagggtcaatgcaaagtaaggtatggccatgggcagatgtaaaccaggtgatacctgcccggaagacagctgtgttttaagaatggtaaaggatgaaaaaaagcagactccggaaaaaatcgccaccacggcctttgaaataatccgcactacccttcctgtcattccgtgtattttatccgtaatagccgtgatggaaatttgtgtattgtcccttaatcctgcctctgttgccagcagtgccatataaaccatgcaatagcgtgctaattcctccagccatgaaacacctgcatggattatatttcggttaactacctgggcaaaggacgccagcaccataacagtaaatgtggccaccagaataaaatcctctatcttctgtaaattggcaaacagccttttcatccttatccctcctatttttcagcttcaatcgcttccacccaggccggatccattcggtctgcaaactgttccattgccggttctaccaactttcgcatatcatcaataggtatctcataaaattccacgcccagctctgtcagttcctttactgccgcctcatttgcctccaccagataatccctctgtctctgtgctcctgcttttacaccttccacaaagtcttccctcaagtcatccggtatctgattccatgccttgtccgacataaacacgcccatataaccaaaaacatgattggtccatgttacgtttttggttatctcatagtagcgattggcaatcagattggcgatggcgttctctgccgcgtcaatggtgccctgctgtaaaccggtaaaaacatctccggatgccattggtgtggcaattgcccccatggcattaaacgccgcaatatgtaaatcattctccatggtgcgtattttaagatttttcatatcttccagggatgtgaccggacgggtggagaagatattgcggaaacctacatccatccaacccactgtatgtattttctgctcttctgttttttcagcaatcagtgttccgactgttccatcaataacacgatgggcttcatctgctgtctcaaatagaaatggctggtcaagcaccgccatttcaggaatgaaagaggtgagtactgcgttggaggccgtaaacatgtcaatggtacccatttgcgcaccctcgtacatgtctctttcattacccagctgcccgcctgcaaatacctgtatggttattcttccgccggtagccttattcacttcttccgcaatggccagggctcccttatggaaattgcttccatccgggtccaccattcccagtttaaacgtaatggcgtctttctcaggctttgcctccgggaccgaatctgcttctgttttcacatctgaaactcctgctgaagtggtttccgcattcttaccctgcccgcaggctgccagcattccggctgttaatactgttgtcaacaatactgcaatcttcttcataatcaaattctccttctgctttatcctgttttatttgtcctgctttttttcgggtgacacagcctttccctgcttcatcatctcctgaatctgtgaatctgaatatcctgcctcctttagcagctctatcgtgttctcaccaagctccggcggcagccgtcttaaaggcactggttgcccatcatagcggttggcatgtccgagaactttcacctcgcctgctaccggatgattcatggtcataaaacactggttataaacaacctgctcatcctttacaacgtcctcatattcattaaccggcgcataccatattcctaactcctcaaatattaactcccactcatttgtagttctctttaacaattcccggcataccaccttgtcaaattcaatgcggttatccatctgatcctttgccgaaaaaccttccagcgcgcctggtgtaaatgcctgttccaaattctcaaaggaggtaagggagagtgtaatgtatttatctgctgtcttatagattccatagggtgactgatgaatcctggtcgataaaccggtatctgctctcggtgtaagcgtcccaccattcagataatatccaataggttcaatctgaagatccagagctgaccccagcaggcttgcctcaatgcggtgtcccttcccggtcttatcacggtcatacacggcagcggtaatgcccagggctgccaatatagccccgtgctgatccaccagcgctgtccctgtaggcatgggaggatgatctcccggtcctgccaatgccgccagtccgctcattccctgtatgagaagatcctgccccggctttctcaccttgggtccactggaaccataacccgtacaggagcaatagatgactccagggtttaattttttcaattcttcatatcccaaacccagtttatccataactccaggccggaagttttccaaaatcacatcataccccttatcacggaccagcctgtagatggtctcccgtccctcgtcagactttaaatccaaagcaacccctctttgattgcggttcgccatgaggtagaaaacgctgaccccatttttgtacgtattgcaaccggaccagcccctctcataagcacccctgcaagactctacctttaccacatcggctcccaaatccgccaatgcctgtgctgctgacggcccctgcagataatgggtaaaactaagaacctttactccttctaacattctgaacattcccctccttttaatatttttacagattataaacgtttataatttctttcttaaaaaaatccgaagaataaacactatgcttcgaatcaaacatttaaaattataaacgtttataattttatgtttttaaaataacacacatagattgtgttgtcaatagttctttgtcagattttttatttttataatatttggttatctgtttttgtctaagtttcacaaacaggtatcccctcttatatcgcatactgactgccgaacaacaagctctcctcttagacgggcgggaggagcagggctgttgccagctatacattcaaggagataatccacacctcccttagccatcacatcctccggctgacgaaaactggtgagaggcggcatcataagtgaggccattgaaatatcatcatagccggtaaccgaaaaatctccggggatcgaaagtccgcaatcactagccgcactatatgcgccaaaacacagcatatcattggctgctattaaagcagtgggtctgtccctgccttcaagcaccttccgtatcctcatataggaatcctgtatgtcctttatatcaaaaataaactgcttggcgcattgttccaatccatgttctctcaatgcctccatggtaccctcaaacctctcctgataaatctgattctcaaagcccaggtaagcagcgcagatatttttatggccctttccgattacatatttcgtcactgtatatgctccataaaaattatcactgggaatacaatttgcaattcctttaaagcttctattcaggaatacatacggaataccggcattatcaaacccacgaaaatgctctatatgccttgaacagggcaatataatcacaccatccacattccgctttttaagggtatcaaccagacgcttctccttatttaaatcttcattggaattacagagcaaaatcatatatccctttttttctgcatattcctcaatgctcttagctacctttggataatatgggttggtaatatccggtacaattaaccccaatgtatctgtacttcctatcttaaggcttctggccgaataatttggcttataatccagctccctgaccgcggacaataccttttccatggtcttcggtgtgatattttctttatttgcaagggcacgggacaccgtacagatagataccccagccagttttgcaacatccttaatcgttgccatcttccatcccccaaattgtaaacgtttataattaaacactaccatttgtttcttaaactgtcaagaatttccctgctgtgggggggatattttatattgaactattttatttatcaaaaaggccgtcccgaaattgccaaaatctcaaaccggcattttcaggacagcctgttataaaattatatgtatcacgcctctacacggccccaaacttctcctgagcatccagcacatactgcacatagaaggcagctccgttcaccagagcatcctcatccagatcaaagcgttcattatgaagggaatagcagcaatcctttgactcgttgcggcatcctacaaaagcgtaaacccctggaaatttttccagaaagtaggaaaaatcctcaccgcccggcgtgcctgcatattttaccagtcccttgtcgcccaggattttcctgacggactccgccgcaatcccgctgcagtactcgtcattgatcgttgccgggatatcagaataatagtcaaactcatattcagccctgtaagcttcacaggtgctctttatgatacgctcaatcatacccggcagttccttctggagcttgggattgaaggtgcgcaccgtaccgctgagctcagccgtctcggcaaaaacattggccatggtaccggaatgaaaggtacagatactgaccaccaccgtatccatggggctggtctcccggctggcaatactctgaagggcatccactacctttgcccccacataaatgggatccaccgcgtactggggcatggcgccgtgtccgcttttcccgataatcttaatattcatgaaggaagccgatgtatagcggggacctggatccacggagatggtgccgctctccaggtacgggaatatgtgcatgcccgccaccgtatccagctttcccacctttccggactccagcacctttaccgcgccgttggtcagttcctctgccggctggaagataagttttaccgtgcacttaagctcatcctgatgttctgccagaaccctggccgctgtcagaagcatgctgatatgtgcgtcatgtccgcaggcgtgcatgacgccctggttctgggaacagtagggaagattcttaacctcccggatgggaagcgcgtcgatatcgcagcgcaggccaatcaccggctggtcctcttttcctttcagggtggcaatagtgccggttcccgccacctcctcataaggaatccccatcccggcaagttcatcccggatccgtcctgctgtctccacctccttccagctcagctccggatgcttatggaattcccgccgcatactgacggcataatcatgatatttcccaacttcttctattacgttcacagtcaaaatcctttcttactaaatttcttcttacaggattgtccttttttatatacctttttatatcccctcttatatacccttttatatgccttatttatacctttttatatgccttatttatacctttttattttacctgcttcacaggtacaccggttaaaacggaccataaccaatctgaacagccacaaacaaaaagattaactgcagaatcaggaaaagtccatgtaaaggcaggataaacttataccagctctttaacggtaccttgccaagcgacaggtagataagcagcgttccgttggtaaaccagaaggtattggatataccgtcgccaaactggaacgccagtacggctgtctgccttgtaatatgcagcatatcagccaatggaaccataattggcatgaccgcggtggcctgtcctgagcctgatggaatcagggcattgacaaagaaatttacaatgaacatgcccaccgtgctcacataagcggaggcgctgcgcatcagattggaaagcccgtgtaccagagggtccaccagaccgccgtttgtcatggtccactggaccgctctggccacaccaatgatcagggcgccgctgaaggctcctcttgcgccgtcaagtaccatattaatgccatcgtccagattcacccggttgattgcagcagacacaataccgccaatcatgaaggtggctgccatttccgtatatgaccagctcagattcaggataccgtaaatcgttacaaggatggagatggtcagggaaataactgaaacctttttgggaaggtcaaacttaaggcccggatcaaccggaatgcgcagggaggacgtgtccacatccttcacaaggctcttggacggatctgccttcaccttttttgcataccgcataacccataccaagctaagtatccacacgcagaccagtgccgcaatcctcagctcccatccggagaacatgggcagctcggcaatggtatgggaaattcctactgtgtacacattaaaaggcgcaaccgcaaagctgatcagacaggcaaatccggatatggccattccgaccagtgagtcatacccaagggagagggccagggatacgataatgggtacaaagggaatgatgtgctcactccatcccaggatacctccgaaaatgaaaaacacaatcattacaattgctatgattacctggctgctcatcctctcggaagcctttaaaacactgttgattgcagcgcctaccgtattggtccttttgtagatctccacaataccgccaatcagcatgacacagaacatcatattggccgaggctgtcaggccttccggaatggaccggaatatgttaaaaaacgatacgggcgtgcgctccgtggcatgatagctgtctgccaggacccgtgtgaccccgtccacggtttcacggtcataggctcccggtatcacaaaataagatacgattgcgcaggcaagtaccatcagtacaagcggcacaaacggattcaaaggcttgtttgctttttgcttatctttcgtcattgttttcccctttccctggcaggaatttaaaaatagcgtatgatattctccaccagttccaacattttctttacgtcctcaattacaacatactctcttgcactgtgtgaatgatagatattaaagccaatgggcacggtcctgattcccagctggtttgtgcaggtggcatccaggactccaaatgacctggcaggtatcatggaaagcccggacctgctgtagatggaagccaatcgttccagcatatctgtattttcactgaaatctgtttccggaacatcctcctcttccctgatattgcatttgcaccccatgcgctcagccgtctcctccgccttacggcggatcctatcccggatctcctgcttgatatcattgccaaagcagcggatttccacatcaaaccgggcgtatttgggcactgcattggatggcgagagggataccagatcaaatacattgatgctcaggttatcgttcagcctgccaacaggtatctggtgaatgatttccactgctgtcagcagggcattgacccccggctcctcattgcggataacatgggcggcgcgcccaatcagttccacattcatataaagcctggcaggtgtgcgtgtcaatacctcccctgtcacgtagtggtcgatgacaattgcctcctcgctctctatcctggaatagtccgcatattttgctccgtggagccccagctcctggcacacagtaaacaaaagctctatggggcggtttatttctccctcctgcataagccgctccacagcctccatgaccaccgcgatggccagcttgccgtcagcccccagtacgctgctgcctttactcctgatgcacccgccttccacacagacctccacttgattgctgggcgcagccgtatccagatggaatacgaacagaaaagggtttttaccggacctgcccggaattctggccaggatattccagccgtcggtcaccacctcattgcccagctcctggcgctcaaacggaatccccattccggcaagctcctgctccatatattcacaaaatgccttttcattatgggattcgcttgcgcactccgcataacgtataaaccgcgaaactgtcctgtctacgtttctccctccttccatctcttaccctgcaggctgtattttcctcacagactgcattttcccgcaggctacattttccccacaggcttcattttccccacaggctgcttgttacaagtgataccattttatcatttaggtatgtgaaaaactattgtttaaaccatgtaagttttattctgttttttgtttaaatgcacaaatttccatgtatatattgcgtattttacaggatttattataataaatgaaaaagaggacaataaacaacgtgcccgcacggcctgcaaggaggtaacctgtgattgataataagattatgtatgaaattatagaaaaactgcacgaaagcttttctgcttccatcagtatctgcgatgtaagcgggcgcgtcattgtgtccacggattcttcctgcatgggcgagatgaatctgcttgccatagaggcccttaatataaattccaaggtaaccgtgtccatggacagcaagattcaaaaggcaggcgcggccatgcctctgcgttttcagaaaagccggatgggcgccgtggttctccagggcgcaggttcctccagctcccagctggctgaactgctgagcaagaccattgaactattgtatgaagaacttatcctttccaagaaaaaacaaaaccggacccaggagcgggaccagtttctctatgaatggctgcacctgcagtccgattatacggaaaattttataaagcgaggggagcatctgggtattgatatcacaggaaaccacaccataatcctgatggagcgcaaacaggacgacctctttacgtccacctccatcattcagaaccttttagacgatcgtgatatcctgcttcccctctcccaggaccagaacctgattatcctgaaggagaatgagcattttgaaaaaaaatataaccgtgtaattgccgccggacataactgccataccggcatctgttccggcagcgcccaccttcacacagcctatcaggctgcccttgaaagccttaagctgggtaaaatactgtttccagacgagcatctccactgctttgagaagatgaagctggcaattgcgctgtctaaaacccccattcccggactggaggactccttttcccttcttgtcgcaaagggcagaaacgcccagctggccgatacggccataacctatatacggctgaacggcgatattcagaaaatctgcgacaaactccatatccaccgcaacagcatcccctaccgcatccgccgcatccatgaaatctgcggccgtaacctgatggattactatgacatgctctgtctttatgcgtcgttcatacggtatgccgggaaggaagcggatatacagtagcgggaagggcagaggcaggtactgggcaggcactatggcaagtgctatggcagctcctccagcatgtcttttacgcattcaataaattttttcatggcaggtgacgcctccttccatgacggaactccgattccaagagagacaaactggggagggtcaaagggaagggtgaccacatctccggaccagctgagggtaatgagcctgttgttcaggctcatgcccagtccggcctccaccatgcagtaggtggtatatgcatctgctgtagaaaagcgtatgtccggcgtcagatgtctggacccaagaaggcggtcgatttccgtatcctggttaggcatggttatgataaacggttcgttttccagggcgcacagcggaaatgatgcctcccctgccccggggtgattcttcggaagccaagccagcagctcgtcctggcgaatgggaatccagtcgcagattgtcccggcggcaggctcagcaaaaaagcagcagtcaacggacatctcgttcagccaccgtgtcatctcacggtttccaccctccttcatgttaatcctgacattgggatacaactgccggaaccgcttcaatatgggcggcagccacatggctgaaacgctgtagtagcttccaatggtcagggcgccgcttaaaatgccgcggatatccgcccctatctccagggcatggttatgggcacggacaatctcccggaaagccggaatcatcgccttaccgttttccgtgggagacacgcctttttttgtccttataaaaagcgggaacccgacctcctcctccagggcgttaatcatccgtgtgattccggactgtgtatatcccaggaaaacaccggctgcagtcagacttccatggtcaatggccgccagaaaggcttcgcatttcgtaacatccatatctttctccatccatgattatttgtcatggttaatatgataaatcaggttttgtgtcatacatgaaatcattgtacaatagtgccaatgacatgtcaaacacaataaaaacatattacgttcggtgtgggaaaggatgactctttgagagggttctctcccggaaagtgccattatcttcacacaccggagataagaaaagaggataacgaaatggaactttgtatgcacagcaggccttcttttgcttccgattatatggaaggcgcccatccggctattctggcccgccttatggagacaaacatgcttaagacccagggatatggaagcgaccccttttcccaatcagcccgtgaaaaaatccgcgcagcctgcggctgtccggatgccgaaatacattttctcgtaggaggcacacagaccaacgccactgtcatacgcggactccttcactcctatgaaggtgtaattgcagccgggtccggacacatcagcgtccatgaggccggcgcaattgagctggggggacataaggtgctgactctgccccatgtgtcaggaaaactcagggcagcggatatcgaaggcctgattggggattacagaaaagacgcaaacagcggacatatggtcatgcccggcatggtttacatctcacagccaacggaatacggtacgctgtattcgctcagtgaactccaggagatcagcagcgtgtgccgcaaaaacggccttccgctgttcctggacggcgcgcggctggcctatgccctctcctgcccctgtaatgaagtatccctcaaggatatagccaggctctgcgatgtgttctatatcggcggaaccaaatgcggggccttgtttggagaagcggttgtgataacgcagcagaacctgatcccccatttcttcaccgtcattaagcagaacggcgcccttctcgccaaaggcagaatgctgggcatacagtttgacaccctttttgaagatgacctttatatgaaaatcggcgcttccgctatagcggccgccgaccaaatcagggataccctgacaaaatgcggataccgcctgttcctcgattcacccacaaatcaggtattcattgtaatggaaaatgaagccgccgcccaactggcccggaaggcagagattaccttatgggagaaatatgatgacactcacaccatggtgcggttcgtaacggattgggcaacccagcaaagggatgtggacatgctggttgagatactggaacaggaatgtaatcccacgctggcctgtgtttcatagagggcgctgcaccacaggcaggtctaagttttctttgagaataaaaacgcgctcccagggcgggaatattcggaagattcccgccctcccctccttgccttttcattggagaatttcacatttttgtcatctgccccctatcaattcatttctcattccattgaccggctcaattaattgctccataatgatttctcagcattcctgaacatgttcccctctcagataccatgctgtcttagcgctttcctccagttcccccaatcccgaaaccataaataccgttttaattgcaaataccagaatcttgtcctataattgtcatataatacggggtaaaaaccaggaagtaatctgtctttgtgtttataatagagtttctatggggttatcgcatctggatcaggcggtaaaggcttcaagcttttgaacactgtgcgtcattcacaccgattgcccaaccatatattaaacttttagtattattaggagagacgaaaatgggcttgatatacgatggcttgatgtatgaaagaatatatgaaatattaaaggaccggattgaatccggagtgttacccgctggcacaaaacttccgtcacgggataatttatgcagggaatttggaacatcggctaaaaccatccgccgcgtgttatccatgctgaaggaaaatggattgattgagacacaccaaagaaagcgtcccgttgtaagtttccatcagcaaaccaggcgtccaatgataaatcttgcattgaagagagtagatacctcaattaccgatgaggttctaaaaacaggagttttattggggtatccattgattgaaaatggaattgctctctgcaaacaagaagactttataattccccggaaaatcgtggaaaatatggatattaataactccgcagagttctggcggttagccaaacagtttcagaggttttttatcagacgaaatgaaaatgatttaagcctgcgtgtaatggatagtctggggcttgcggagttaagacctctgcaagacaatttagaaatcaggaccaggttttatgaacaaatgcaggagctgatgagggttattgaaaacagaggggatactgatagtgtccatttcgatgacctgtccggaatgtacgggctcacatatggaagcgaacctgccttcgatgttcctgtggactccgcggctgtacttggcagaaagcagctggaaaagctcttactaagagaagaagtaagatattcagctgtttatatggatcttttgggtcttatcaccatgggacgttaccagccaggagacaagctcccaactcataatgaattgcagaaactttataatgtgagtgtggatactactcttaaagcaatacagattttgcaggagtggggtgttgtaaaagcagtccgtagtaaagggatcttcgtaatgatggatatacaggccctaaagaaaatcgaaatacctccccacttaatcgcatgtcatgtccgccgttatctggatactttggatttgctggccttgacgattgagggtgtttccgcctatgctgccgaacatatctcacagaaagaaattgaggaggcaatgagtgaaattaagcgctgctggaatgaagaccaccgatatatgcttaccccttcattccttctgaatcttatagttaagcataccggggatggttcactcaatgctatctatatacttttacggcaaaatctggggataggcagaagtattcctgccttgcgcgaaacagaaaaaactgctgaagactatgaactgtatgagcaatgtgtcactgcactgaatcagctttacgcaggaaggcaggaagatttctcaaacgggaccgctaaagcatttcggtatatctacgattatgtaactgaaaaatgtaagaacttaggctactatgattctgcgatggctgtctatgatggtagcgcgttgtggaaataacagccatcccacgcgatttttaaactggaactgtccatggcggaagcagctcccttttcatctgaagcagctgccgccattatatcctatctttatcatctatatagtcaattccgtaaatttccggctctgtaaattcatactccattactcgtaataatccctgtaatattctgcactgctgtgcggaagatatgatggaaccttttattgatgataattgtttctggaacggaactgtcatcctccaatagcaagtaaaatattgcatctcaaagactaaaaaaacgaaggtattgttgatatttaaagactgcggtgatataattattgaatatatggttaaggtaccaagattcttatgtcagctaaaagtacccggcagtatagtattcttttccttaccttcatctgaagcgtaaggtatatttttgtttacctgaaaactggctgcatggacatggttattagcatttttttacggtaagaaacctcatgtatctgtttgagtatgcatttacaacctgtggagcaaagtgaatcagcggactgacaatattcaattaaaatgatagtaagaataaatgatacgattgtaaagggggatatcaatgcaatggataagatgaaccatggtgctgtaaaatgccagctaaaatattgtgttggaataggggcttctgccggaggtgtggaggctttacaggagcttttccggaatatgccgctggatacaggtgcctctttcatcgttgtacagcacttgtctcctgattccgtgagtatgatggataaaattctacagaaatcagttaaaatgccggtacgtctggcagaagagaacatggagctccggcctaatgaggtctatttaaacattcctggcatgatactggaggtagagagcggacacctccatctcagtccggtacatgaccgtgtacagcgctatgcgcccatcaatcaaatgcttaattcccttgcttcggataaaaacatacacaccattgccgtgattctctcaggcagcggatcggacggtaccattggtatcggctctgtcaaggaaaacggcggtactattattgtacagaaacccctggaggcacagtacgcttcgatgccgcagagcgccattgccacgggcctggtagatctgacagaaaatgtatccaaaatcggactggcaatacgggactatttaaaaaatcccaataaccaataccttcactatgatgacggggttgagaatcaggaactgtcaggatattacaatcaaatcattgatgccatatcaaagtattctgatattgatttttccgcctataaatccaatacaatttaccgacggattgaacgccgcattgcaatcaataaatatacctgtattgaagattacatggaccatctgcttgcatcagaggaggaaaaggggcttttgtgcagtgatcttctgattggagtgacttctttctttcgggatgaagccgcttttaaaagtctaggcgagcatgtactggccccgctgcttcgggaaaaaaaatcaatccgtatatggagtattgcctgttccactggtgaggaagcatattccattgcaattttactctgcgaatatatggagcggctgaattacaatgcggatgttaaaatttttgcctccgatacagacccggatgccattgctgcggctcaaagaggcttctatatcgaaggcagcctggccagcattaatgaactcatgatagaaaaatattttgataagaaagaggacggctacatcatcaaggacatgatccgtaagatgattgtttttaccaaacacaatatatttagagatgcccctttttccaaacttgatttaattgtatgcaggaatatgttcatctacgtaaaaccagaagttcagcagcgtaccattggaaattttcaccatcttctcaatgacgatgggtgcctgttcctgggcaacagcgaatcactgggcgatttggaaggagcgtttgatgtcctggacaggaaatggaaaatattccgcaaaaataaagagttccatacagaaaataatggtttttatctatgggataacctgtctcaccctcagaaggcaatgcaagaacctgctggaaatctgcgcccaaaagtccggcctacaaatatcttcgaacggcttttttttgattttgcaggaccgtcagtcctggtggacggttacggaaaaattgtacaaattattaaaagcggaggccggtatcttcgcttgcaggacggacagtttgataattccatcagtgcgtgttttgcccccagcctgacgattcttctgaaccatattatggaacaaatgaaggaaagcagctgttcatgtgttgaaaaaaatgtgacaggagtggcggactatccggatgaaagcctaaatattaaggtcaattattttaacctggataatgacgaatattttttgttccagataggaattggccggacagccatgccggactcagccgataaaagcctggatatcagcgaattaacaaacagcaggattgcccagcttgaatatgagctgggggaaagcaactggagactgtctctggccatggaggagtcagaatcccgcaacgaggagttacaggcaacaaatgaggaactgatggcatccaatgaagagctgcaaagcaccaatgaagagatgcagtcaatcaatgaagaactctacacaatcaacgcggagcaccagagtaaaattacagagctgactacggcatactcagactttgacaatctgttggtaaatgcagaggttggcgcactttatgtggaccgggatatgaaaatccgtaagattacccccatcatgctgcaaaacaccaatctcctgaactcagatttagggcgcccggtgtatcatatcaatttcattgattcctatgagagctttaattcagatattaaaaaagtggctgaaacagggacaattatagaacgggaagtgacggatgcccgcaactccatatggttagtccgaatccgcccttattatgaaaagccggagcaggtcggcggactgctggtgactatgtttgacatcaccaggcgcctggaggcagcgaagtttgagttaaagcgcctgacggacagtgtgccgggcggtgtagtgcggatgcattatgacggagaactgatcattgattatgccaatgacagcttttatgccatgaccggctgcagtcctgaggatgtaaggtatagatttcacaaccgtctcagcaaaatgatactttctgaagactggacacagatggaacagcagattgagtcggcggcagctggaaatggtattttaaaatacgagtaccgcggaggcagagatgctctgtctgccaggtggtattccatccaagccacagtgtttcaggtaaacggcctgactgaactccagggcatcatcatggatatctccaaattgaaagactatgagcagcgtctgcaaagagaacgggattattataacaccctctatcagaacatgctctgcgggattgcgcagtatgcatacgacgaagatgcaatggactttattggtatcaatcctgaatcgctccgcatactgggctattcatccctggaagaatttaagggccagggcgggcctacgatgctggacataacatataaagaggatagggaaagaattgtgggaatgctgcaaaccctaaaaaaagagggtgactgcgtcagctttgaccaccgcatcgtccgtagtgatggggaaatccgctgggtaaccggtgcctccaagcttattacatccccagaaggaaagctgctgatacaaagtacttttattgacacaactgaggaaaaaaggacgcttgaacagcttaaggaggaaagggaccgttatgatctgctttacgaaacctcatacaatatggccgtgtgcggcgtcatccaggcagatgtcaaacataacaaaataattgctgtcaacaaagaggccttgcagcttctcggtacagacgcggcaggccttgaaacgcagttatttagccgggaagccgaaaaaggtgttccggatttaagcagtatcggtgaaatgatgcaagccgcagcggaaaatgaacacaagcgcttttcgcatattctcaattttaaagacagatatatgtccattgaaggcgctgtggattacatcatggaagacaaaagcgtcagggtggttcagtttacatttttagacaatacggaacgggagcttctgcgtcaggcagagacgaagctggagattgccacgaaatccagcaaagccaaatcctattttctctccaaaatgagccatgaaatccgtacacccctcaatggaatagtgggtatgattgacagtgcgatgctctaccgccatgataaagaaaaactgctggacagcctgaacaaactgaaacgctcctctctccatctgcagcagctggtcagtgaagtgctggacctgtccaaaattgaaagcgggaaaatggacgttaatatgggaccggtgaatctgcagcttttgctgtccgatgtcattgaagaatttggtacgatggctaaggaaagaggaatcggcctaacccagactggaaaactgcatcataaatatgtgaataccgataaggtaaagctccatgaaatactggcaaatctgattggaaatgcccttaaattcaccgacagttcaggggtggttctgctgaatatagaggaaactgtaattgcagaacgggaatccctgtatacgttccaagtacgggataatgggaaaggaatcagcaaagaagatcaggaacggattttcgaggcctttgaccagggttctcatgaccatttatacgggaattcagggagcggcctggggctgaccatctgtaagagcctggtggcgatgctgggaggctcgctgaaagtcgatagtatagaaaatgcagggtcggaattctcatttactctcacaatggatctgttggacgaagaaaaagagacggatactccggtaaaatcctgctcctgttatcaggggcatcgtgttatggtagcggaggataatcttataaatggggaaatcgcagaaacctttctgcgctcctttggatttgaagtggatttggtgaagaacggccaggaggcatttgatacctttgccgactcaccggagggaacctacagtatcattttaatggatattcagatgcctgtcatgaacgggtatgatgctgcccgtcagattcggtcttgtgaaaatggagacgcaaaatctatccctattctggcaatgagcgcgaatgcatttcaggaagacgtggcgtgttcactggacgccggtatgaatgaacatctgtccaagccaattgatatggagacattattcagtgtcattggcaagtatataaagtaaagcttaatgccgcagtgcgcatgcacttctctgctgtctctcaatcatgtacaatgggagtattccttaaaacaagcggaacatttggaatatggtataggcttgcttatattgatagaggaggagtgcgcatgaaaatcaaacagggaaaaggcagatacatcgcgcttgctctcggaaacattgctatcgttgcttttatattgattctttcaataagctatgtacaggacgtacagcgtgacaaggccgcaacagcaaaagaatcttttaccgcagcaatggaatccacagcccagctatcctatggttatatgagcagtctgcaaaatgagtgtgacagctgggcctcctatttggaaaatcatgaatattcgatggatgaagccattgaatatctgaaggaagttaatataaacgattatgtctctgtacatatattgtattatgatacattgtccgggttatccgcaggcttagaacagagtgtgaacaaagttgactattctcagctaacagatgcattttcctacatcctccctaaaatggtaaacggcacaaggggggaaggaaccatttacatatcatcggcatatatcaatcccatggacggggtcaatagtgtcagtttctgcagccttctgactatcagggacgaacatggcggccgtgcaaaggccatactcgtgaaaacaattcctgtggagattctgcatgcccaatggattttcccaggagcataccgtgaagcagaggtttctctgctggatatcaacggacagtatatcattcaatccgactccatgggaggtgatacattctggaccttcatcaaacaacacaacgacctgtcttacgttgacataggtgaataccagagttcctttcagaaaaaggaccactatctggttgagttgatggatcaggatggaaaaccggcctattacgtcagcgcacagatagaaaacacgccaaactgtacatttgtgggctatatccaatccgagaaactgtctgccatgggctatgactatgactggcagatgtctttatatatagttatgggatttatcttcctcctgctgcttgacggaagctatgtcctgcatataaacaaacggcttagaaggagtatcgaggaaacccaaaatgccaatatggcaaagacaaaattcctttcttccatgtcgcatgatatccggactcccatgaatgccattatcgggatgacagaaatagcgaagaaacagattcataatcctgcacaggtacagtactgtctggacaagataaccttgtccggaaaccatcttcttactctggtcaacgatgtattggatatttcacaggttgaatcaggaaaaatggcattacacccggttgtgttctcccttcctgaatgctgcgcaaaccttattaatataataaaatcgcaaatccaggaaaaggaactgcaatttgacgtgcatgtgcgcaatttaaaatatgaatatctatatgcagatgagctccggatgaaccagatattcattaacctccttacaaatgccgtaaaatacacaaatccaggcggtaaaattatcgtggaatttgaagaggccctgcagccaggtgacaagggtaacgtggttttaatttataccgtgcaggacaccggtatcggtatgtccagcgattttatgagggatatgtaccagaccttcacccgtgcagtagattcccgtattgataaagtacatggctcaggcctggggcttgcgattaccaagcagatggttgagctcatgaatggcaccattaattgtgagagtgagcctggaaaaggtaccagattcatagtcgccctgccgcttccagccactgaaattacagataatttaatgcttccgccccttcatctattactggcggacaacgataaaacatcccttgatgcagcagtaaatatgctggtatccatgggagtggcggtcgatacggcagacaatggacatacggcgatcgaaatggcagaggcaaagcacaatgctggtgaagattaccccattatgattgtgagccttaaaatgccggatatgaatggaattgaaattgccggaacgattcgcgctaaggttggcgaggactttccaatcattcttatcagtgcgtatgattgggttgagatggaagatgctgccaaggcagccggaataaatggtttcattaataagcccatgtttaaatcaaccatctatgaaaagataaacgagtacctgcaattcactgaaaagaatgaaaaaacggccgaaagcagcgctgatgaattacagggattacatctcctggtcgcagaggataatgatctgaattgggaaatcatccaggagctgctgaaatatagaggaatcacagcggtcagagcagttaatggacaggtttgtattgacattttaaagcatgcagaaccaggtacttttgatgcagttctgatggatattcagatgcccgtcatgaatggctatgaagcttctgcagctatacgtgcatttccggacatgtatatacggaatattcctattattgccatgaccgcagatgccttcgctgaagatatccgagcctgcctggatactggaatgaatggccatatagccaaaccggttgacatgaaaaagctgtttaaggagctgagaaacgcaggacttaccaataggatggaaaggaaacgctgatgattatgaaaagggcattgaccattctgtcagtatcaattctggccgcggcctggctctgcggatgcggaaaaatcaggaaaacagaaagcagggacgcagacgtcttataccatgcctgctattcagaaccatacgtgacgttagacccaagtgcagagcagtcgaatggtatcaggatactgtataatgtatatgaaaccctgacgcattacgatgataagaccggagaagtcatacctaaacttgctgttgagtggtcatccaatgccgatgccactgaatgggttttcaaactgcgcaacgatgtccaatttcatgatggagaaaaaatgaatgcggaggccgtcaagaaatccattgaccggaccattgcccttaataaaggcgctgcttatatctgggacagtgtggattccatcgaggtgaccggggaatatgaagtgacctttcatctccgctacggtgcctcaatccccctcattgcgtcagcaggctatggcgcttatattatgagcccgaatgcggctgataaggataccgaatggtttaatgcaggaaatgacggaggaagcggaccttataccattgctacggtttcagcaagagcggttaccctctcctcctatgaaggctatcgcggcggctgggaggataatcagtataagaacgtctatatccaggagatttccgactcaggtacacggcgcagacttcttgaggccggcgaggcccatcttacttctgaattatcagcagaggatcttgcagcattaagcgagaacgatggagtcaccatcctgcccgctgattcgttcaccaatgtaatcctgatgctgaacacaaaaagctccccctgttctaatgcagattttcgaaaagcgctggcatatgctttcccatatgaagaagcggttcatgatattttacagggaaatgcggctcaatcctgcggtatgataccgaaaggcctttggggccatcaagataatttaacgcagtatcactacaacctgaaaaaatcagcggagtatcttgaaaaatcaggattaatggatgctactgttacggttaccttcatagtaaatgatgccgtatatcgtgagattcttcaactgtataaagaaaaccttgcccaaataggtgttaccctgaaacttctcaacatggactgggatgcccagttagctcttgcaaagagtcccaatccggatgactgccaggatatattactaatgaaatggtggccggattacgcggatccggctggctggttctctccgctgctgatgagcagcggggattcagtgggctacaacttctgttatctggatgatgatatatttggtgaaaagaatcgcgacgccgtcaggctgacagcgaccaataaaaacgaggcggaaaaactttatattgagatgcaggaggaaattctggaccaatgttatatgatttttgcttataacacgcttcaatactatgctgtaaataatgcaatccacggtgtatacgaaaacccggcttatcagacatgtgtcagctattatgatattacaaaagactgaaaatgattggcacttatgcatatcagggtctcatggatttttaccagtaggcggatatagcgctttatcattcaatgtacactcgtttttatcgttaattcccgtattttgaaatttcctccatctgtatggaatcgtattctgccgccacttgtgcggcactcttccctctgcagagctgctggcttaagtcccgcacattttcccacacattgaaattcaggctgaaatcctgattaggaatctgtctgccttctgctatacaggcaataaatgaatttgtctgaggtatatcaggcgctgtggcattttttgaagaggatattcttccctggcttttggccagggaatcaagtgtttcagcctgccccagcgcttctacaatggcaatagccgagtctaaatgttttgactttggattgattgccattctctgatcagcccccacaacacagatagagccatttttaagcacaggtataggtgtcattgcgatttcaaacggatagccttctaacgcttttccgctgtagattgcgcaaataaaagcgcagtttccattggcaaaaaacgacttttcctcctctttttttggaagcgtgtcaagtgcccgctccggattcatatatcctttatcaatcatcatctgaagaaagtcaaagcctttttccatatattcactgattgccaccgtaccatttgacaatgcttccagcttttgattacaatcgtcactctggtaaacatcataaaggccggcgcacataaccggaactgtcaaggcaaaatccttgtttgctccatagggaagaattccattttctttcagtgtttcgcatacatcgagaaattcatccagattctccggcagcttcaaaccatactgtttcagcatatcaacattccatataaagccgaaaccagtataagataatggaatcgaaaatacctttccgttataggtactctgcgacagcgcatcatgggacaggttaccggtgaactccagagaggacatatcatatatgtaacctttctcatcaaactccaggacatcttctgcatgtatcgtgtataagtcatccgcatttcctgaagccaggcgcttcaaaagaagctcccggtatgataatccctccgctgcataataatccgcagagtcgctgtaaaccgctatattcgtatttccgtcttgattcagcactgctttgcagcgctcctctattgcctttgaaacctcaatattctctgtaaaggcggtaaccggtgtttcccggatgttatcgtctacatacagctccggaaccgactgctccgtattgcagccagtccccaaaatggcagctatcataagagtccccaataatcccctttttgtcctaatcttcttcattctgtctcccccagtcttaatttataaacttccggaccatactatatagcttatccagctccacgggttttcctatatgagcatccatacctgcatccttgcacctgcgtatatcttccttaaatacatccgctgtcatggcgatgattggaactatggaggcatccggccggcccgaattacggatttttttcgtagcctgcagcccatccatttccggcatatgtacatccatcagtatgatctggtaatatccctgactgctcttgagataggtgtctaaggcttctttgccattatggacacaatccacttcagccccgctgctgttcaaaatctcaaacatgatttccagattcagttcattgtcatccgccaccagaatcctgacaccttccagttttctgacgccttccagattttctgtttcctgaatctgctgttcttcgtattcctggtatccgccctggatgtattgcttcatctgttccaaaatgtcagctttaaaaatcggctttgtcagaaaaccgttaatccctgcctgaatcgcttcctcttttacattttcccaatcatacgcggacaacagaagaatcggcattccgctgcccagccgcgctctaatccgtctggcagtttccaccccatccatctccggcatcttccagtccacgatgacgatacagtaatcatcttccattacatgggcctgccatgctttttccactgcctccatcccattcataacccaatccgcgcggatacccgtctcctgcaggattaagctgatgctttcacacgcatcctgatcgtcatccacaatcagaacagaatagccggccagatccggtaattcctgcatctgcagttttggcagtttaagtggaagttccactgtaaaccgtgagcccatgtctttctcactttcaacatatatatcaccctccatcatgtccactatgctctttgtaatagcaagtcctaacccggtacccgttgcctggctcatcctgctgtcctccgcccgctcaaatggcgcgaatacgcgctccagaaattcaggagtcatgccgattccattgtcctcaaccacaaagcgcagccgtatggtgtctgcatcaacattcgtctctgtaatctgcatactgattgtaccgcccgcctgtgtatatttcatggcatttgacagaagattgagcagtattttctgcaggtggagcccatcgctgataaccgtgtcatgttccaaaatctgtgatttcagttcaaatgactgcctttttttatccatatccggtctgatgaatgaaatcaggttcgccatcatactgggtaaatgcacattttcttccttaaggctgattttcccgctctcgatcctggacatatcaagcacctcattaatcagctgcagcagatgaccggaagccgctgtaattttattcagacaggactctactttttccatattgtccaggctgttcagcgcgacattggtcattcctatgataccattcattggagttctgatatcatgcgacatggaagaaaaaaatgcggtcctggcctggttgctgttctgcgcctgcttgagggcatctgccagatgctcacgcatattatgttctttggttgtctcctgaaacacggcaagatactggccgtaatccgccggaatcatatggactgcaaaccagcgcttcacttcattggggccatcccccaccatggcttccctggtcacctgcttattcaatgttccgtccaggaaactgtttcccgcaggatcatccggcgccattccgctggcactaaataccagcttaggcctttcctgtacctgctttgcagtaattccaagaagcaccggcaggttgtcagacacaagctccaccttctgtgtagacggtgtgtagagcagaaacacaaaatctatattggcggaaagatttcggaacagcttttccctgtactccctctgccttgcctcctccctcatagactgtcttccagttacaagattagcaatcgcaaccgcaccaatcagaagaaaagtaaacatagtataaagcataatgatgataggtgttgactcccgctgaaggactgcccgtggaatcatggtaatcagatagctcccttccggcgcgtctaatggaagaaagccgagaagggatttctggttctcgtttattacgacaagggtaccgcttattccttcctgcatcacctcacaaagcgtattctgtacagccctgctgttcccctgcattgccagatagctgtaaatatccggctgttctgctgtacctctggattcgataatgtaatttccgttcttatccaccacataggcatacccctccccgttattaaaggtaaataaggttggaagattataatcattaataacccggtccgcataaattgcccctatctgtttttcatcctttctgacaggggactggtatgtaatctgaagccgtccgcttgcaccataataaggagccgacatcccgtcctttccactggaaagggccagatcgtcaaagggcagatcagatacatggactaaattcccatcactatctacaccttctccatccatggttatatatgtaaagtgaaaaaaatcagtggattttacatatcccagcaaagtctctccaactgcattctcctgctccgatgcgagcatatcggccagggtaaacaaaagctccctgtcgagactaattttattattcagtccctcgctgataaccttgctggaagtaagaagattctggtttgcgctgaggttcattctgccggtaatctgcacaagaaaaaatacagagattgataaagcagtcacacaaatcccagccggaactgccaacattgcaattgatttttttttcggctttgttttcatttttatctcccttaaatatctaaatactgctttataagcccaaaaagatatcgcaacactttgctaaataatgtgtttgcgataatcaatacgaagcagttcagacacagaggtatcgtttatatagttatcaaatagattgccttctaatcttggtacctcaaccatatattcaaaataattatatcaccacaaactatatgaatcaatcattggattgtattttttccagtatttcataaaatactgaactgctgcttattctgattaccttatgaaaatgtttgccacaacaagcttaacaaatttaaaaatgcccataattcccctctaaaaggaacatgagcatttaaaaactgcttatttgattgtttgatattcacccgatgggttcttactgcgtcccgatatcccctttcattatagcaaccctgctctcatgtctgacctaagaaacaatggtaaacccgtccttcccccgctgctttgtctcataaagggcacggtcagcctgctggtataaatcctcaaagtttgccccgtccctggggtatagggcaataccgatgctggccgtgacactgcatcttatatctccccttccaattaccgtatggagggcggaggagagaatctttactttttcttctacacattccgtatccgatacctgaataaacgccgcgaattcatcgccgccaatcctgccaaggatatccccttccctgaaatgactcttaaggatatctgaaaaactgcagatgcagaaatctccaaaagaatggccgtacctgtcatttaccatcttgaattcatcaatatcaaaaataaaaaacgcatacattttgtccggactctcagacagctgtttatcaatcagacgctcggttgcctttttggaaagaagctttgtcatttcatcaatagcagcctgccactcccgtttcttttccgcatctatgtttctccggtaagagaacatgtggacggaactgtcttcttccgaataaaacaggaaggtttctacacgaatccaatgataatcctcaccgttctgcgaaatcataaagtcatactgaagatggttatttccggcgttatactcccggatggcattttccggggtaaacatggaaacatagccttcccggaactcctctttaatttgttcccgggcaatgacacacaatccctggtcaaagggaagccctccggctcccagactcttaaagtattcctctgtctgtttccccacatagctgttctttgtcagattcaattcgtaaatactgtcgtaaagctgttccgtggcctttttaaaaagagcctgccgctcctcaaccagctccgtcacctggctgctgtacttccggattacagcagtaatgacaatcagaacagtgagaattaccacagtcagtataaaaccagtctgataaagctggcggttcatggcctccacaatgggtccggtattctgttccacaagcagataccaggagagctccggaatataccgctccacaataaagcttctctttccttcctttggacctgtatcagtccagaattccatactgttatccgactcccggaaatcaagtacctgttcccgtatatgttcctggccatatactccaaaccagtccttcttttcatatccattataggtggtggatatctctataaaaccatcctggttaatcaggctggcctggttgccatagctgtcttcatattcctgcagcagctcttccagataatctatctgaattcccactcccacgatgccaatcaccgccccgtccggcgcagtaaccttgcaattcacaaagacagttatcctgttatccgctccctctacctggtcattatccacgttaagggaatactccaaatcattgtcaagaagttcataataccattcgttttccggatcccctttttccattacacggtcaaggccattaaaattatagtagcggccggaatttgcggatatcaggaacacggaatcaaagccatatttcttctggtatgtctccagatacgtttttgtagtctccgcaaaatccaaagcatccatacggctgttttctgcaagaagatggtccaccaaaaggctgtcatgagacattgtcagcgaaatgttcaccggctttgtaagcattgccttcagctggtaataaattccctccgctgtcagggaggatacttgttctatgttctctaatgatgcacggtaattggcgcggtagctgaaaaatgctgtaaggataaatcctaccaccagtatactgctgactaacaggttcgtctgaaacaacttattgtttttcattcgatacctcctctattctctgtgcggaacaactcttactatctattttaagacggattcagcctctcctggcgcgctgccacggctttactgttaacgtctacgggtctgcctgatacagaacattatacacccgcgtctaccctatttccagtttcttttatttcacttatatgctgactgaacagactctttcttttccgttccccgcttcccgcttctcctttaaatttttgtaataaattacaaaataatattatttatctctcgtatattgaaataaaatgcatagtttgatacaattgagctattgatatcattgcaaacccgctgtatggttagcacaatgaatccggaaaggcagcaatggctgttgtaggcaccccatatgaagcggttttttagaggcggactgatctccctgtttattttacttttcctgttcggcagtattaccattcaaacagtaatccaaacccagacaaacggaaggctcatcaactatgtaggaattgtccgcggtgccagccagcggctcataaagttagaactttccggccagcccgatgacgatatgattgcctatctggacagcattcttctggaattacagggcggagaggccacatatggtcttccttcacctgacgatccggcctatcagagggatttggcaaagctggagctgatgtggagtcaggtaaaggacgaaatctctgcctaccgcagcgggtccgctgacagttccagactgctttccctcagcgaggacttttttgaacaggccaatcataccgtgttttccgccgatgcctactcagcccggcagatgcgttttcttctgaccggctgtctggtcatgatgggagtcatgtcactcacctggatatttatattgtgggccaactctaaaaatctattgaagcttgaagtccagaatgaacagctgaatgatctggcatcccgcgacactcttaccggggtttacctgtttagcgctttcaaggaaaaagcccagcagcttctggacaccaggccggaaaagtttgctgttgtctatactgatttctctgacttcaagtatattaatgatgtgttcggctatgattacggcgaccttctgctgtcccaatacggaaaactcctgctaaaggggctgcatgaatatgaattatgcggccgtgtatcagcagataactttgtactgcttctccattacaacgaaaaaagcgagatagcggcccgccaggctgacgcggattacgaaattctccgcttcatgcatacggcccatgacggccagatgctccccacaaactgcggtatctgctgcatagaggatgtcatagagtcactgaccatcgacggtcttctggaccgggccaattttgccagaaaaacagttaaaacaggaaacaagcagaattatgtttattatgatgagagtatccgcagccacctcagagaagaaaaagacatagaaaacagaatgctgactgcccttgaaaacagagagttcacggtctattaccagccaaaggtcaaccttgcaacaggaaaaatcggctgtgcagaggctttggtccgctggcagtcccaggccggcgccatcattcctccggaccgcttcatccctgtattcgagaaaaaatatatgatagaccgccttgaccagtatgtatatgaagaggtctgccgttggctccggagtctgattgactcgggcagaaaaccccttcccgtgtctgtcaatgtgtcccggcttcaattctatgatcaaaattttgttgaccggtatgtgagtatacgcgaccagtacgccattcccccagagcttcttgaagtggaatttacggaatccattgcatttgacaacactgccctgctgctgcagacagtagcccggcttaaaaaggcaggcttctcctgctcaattgatgattttggaaaaggttattcttctctggggctgctgaaaaatctgcctattgatgtactgaaaattgacagcctgttctttgatgaaggaccggaccagaacaaggatatggcactggttgagggtattattgatatggtgaaaaaatttgacatccgcacagtggcagaaggaatcgagtccatggaccaggtcgaatatctgaagcagattggctgtgactatgtacagggctatgttttctaccgccccatgccccagtctgactatgaagcactgattatacaaggatgctgagcaaataagctacatttttatatatgcgctgccaccatgaaacagagaggataagatgatgttttggaaaaaccgtcatcttatcctctctgcgtattacagtgcctgcggccctgtccggctctccccgcccggcccggtgaaaagacggttccctgtattcccctttctgtacttcccaggcggcatttcatacagcttcctgaacatcctgttaaaatgctccacattctcaaatcccacccggctgcttatctccgctatgctgatatttgtatttttcaaaaggatggcagctttctgaaatcggatttcctgtacaatctgtgtaaatgatttaccggtgtattcctttatgattttggaacaatagggctgggaaaaatgaaactgcgcagcggtttgctttaaggtaacactctggtagttgtcctcaatatagcttaagattcttatgctctcctctgtggccctgcgcataacggaaggcagctgaatacgatcttcgtagctttgaagtattttggcaaacagtatcatcagctgattgttgagtatcttttcatagtaccggctctttcccaggtattccagaaacatggaaagaacatattccttaagcacctggtcacccctggccggaataatcagatagggattatggactcctgaatacagggactggttaaaaaaagtggctatcatgtttgtgtcccttagcatattaaaaaatatatcctcaaaggtactccgccttaccagtatgttcaccagcaggctgtcgtcaaatacgctcacgctgtgtatggtatccggcgccaaaaggcaaaagtccccttcctccatctcaatcctgtctttccccacatcctggctgcagtgtccctttacaacataggccagctcgaaaaatatatggcggtgccggaaagggggtgtgaaacggttgtgcttgctaatcacaatatggttcttatcctccgcgtcaaaataggcttcatccttcatgtcagaaggcatccagccccctgatacctccggcacgatcaaacggcgctgtatgacttcattaaaatccagactttccaagaaatcctccagcatccatttatcctgcttcacattataatactgctgataaaaccgctcatcctcgttaaattccatcagctggttctctaattctccggtagtcatggtttttccctcccatctctgttatgattgtaacagacaggttataaaacatcaatttatttgattataaaactcaatcgttttttattgccttatcccttacaataacagcatcaaatacaaggaggggttattgaatgaaacaagattcaaccatgaggtacgtgaagcagcagatatggaaacaaagaattggctatggggtttctgactttgcatgcaatctgatttggcagatgatttccctgtatctcttatatttttacacggatgtcatgtccctgagcgcgaagtccatcgcttttatgtttgttgtcacgcgatttatagacggagggacggatttactgattggctattgcattgaccatacccgtacacggtgggggaagtccaggccttattttctcttcggagccataccatttgcattgtttgccgtcctagccttcagtgtacccgacatttcccagtcaggcaagcttatctatgcctatgtgacttacatcggtctgtcttttacctacactgtggtgaacattcccatggcttccatcctgccaagcctgacaaccgatacccaggaaaggacagccctgtccaccacgcgcaagttcttcgcctttctgggctccacagtggtcagctccacggcattaaagctggtggattccctgggcaaaggcagcgaagctctgggctttcgtatcgtaatgataatctttggtttcattggatgcctgctattcttctttacctttgccactgtaaaagaacgggtaaatacggccgctgagagcgtttccctgaaagaaagccttatgtccctgggaaaaaacaagccctggcttatctttgccctcaacattattttcatgtggaccggcttttttctccagaccagtgcaattgtttactactatacagctgtcataggaagcaaggagctgtcagttaccattgccaccatcatgtccattgtgcccatggcagccaatttcctggtgcccgcactggccggacgcatgggaaaacgcaacctgtatgtgggcagtgctgccatacagctggccgggctggttgtcatcctctttgcaggtataaaccatggggctatactggccggagcagtggtaaccgctctgggatacggcatgaaggaaagcatctatttttccatgcaggcagacccggtggactacggtgaatggaagaccggcgtcaacacagccggttcactgtccgccatcaacggcttcctgggaaaggtggcccaggcggccgccggcggtatcagcggagtccttctggcatggggtgcttaccagggcggtgcttcggcacagagttccaatgcggtactggcaatcaaagccatgtacctgtatattcccatgcttcttcttatatgctccatcgtcactatgctgttttacaatctggataagatttatccccaaattaaggctgtactggattcccgaaacgaataaggagatataacaatggcgcagattacaaatcatattgaaaactttaaaatgaatataaatgaggatttcgtaagaaaagcccaggaactggagccagctcttcactacaaaacagtccggcccgcgcagctcgtctcattccagccttctgatgccccagacaagcccaatggctgggacctcccggtccataacagggcagaccgggtctttgactggattccctgccgtatgcagcccgtggaagcactggataccatgcctctgtcaaagggcagttccgtgtgcctggatttcggcacccaccatgtgggttatatatccttccgcctgacgcctgcaggcagtccgcctgacgctccggcccatatacggattaagctgggggaaatgccctgtgaaattatggaggacaccgcatcctaccagggctccatcagcagcagctggatccaggaggaataccttcatattgatgagctgccggccagaatctctctgcccaggcggtacgctttccgctacctggaactgaaggtcatggacacctcccccaaatatcaggtgctgctaagtgatgtatcctgtgataccgtcacttccggcgacatgtcccaggtagagcccctgaatgaaaatgtgccggaagacctgaaacgaatcgacgccatagcccttaagacaatggaggactgcatgcagtctgtgtttgaggatggccccaaacgcgaccggcgcctatggattggagacttaaggctccaggctctgaccaattacgaaacatttaagaactatgatctggtaaagcggtgcctgtacctgtttgccggacttacccaaaacgaacatcatgtaggcgcctgcctgttcctgcggccggccccgatggtagatgatacttccctgtttgactatggcctgttctttatttcctgtctccatgactattatcaggccaccggagaccgtgaagccctgatgcagctgtggcctgctgcttaccaccaggctgagcttgcgctaaaacgtctggatggcagaggcgtggtaaaagacagcggcgactggtggtgcttcctggattggaatgacagtctgaacaaacaggccggcgcacagggcgtcctgatttacaccctgaggcaggccctttctttagcccggcttatgtgcagtgagacatccggggcagaatccgtcaaacagttggagagctggatagaaaccgctgtccgcggagccctggaatatctgtgggataaggaactgcggttcttcataagcggacagaaccgccaggtgtcctgggcctctcagatatggctggtcctggcgggtgtgctggaccaggagtcaaaccgcagactgctggaacatcttgtaaaggaggacccgcctgtgggaatggttaccccctacatgtaccatcattttatagaagccctgatacaaaacggcatgaaggacactgcactccactacatccgcttttattggggacagatggcggacctgggcgcggactgtttctgggaactctttaatcccagggacaggtatgcctccccctatggctccagaatcattaacagctattgccatgcatggagctgcacaccatcctattttatacggaaatatttcaactgaatcagggcgggttccatctgcctggtatatgccatccgttgcaggacccgcgcactccgcatatgacagaaattcattgtttttataatataattgaattagaatgatataaaacaagacagaaactttgaaggaatatcataaaaggagcgaatatggagattcaactgaagaaaaacagtacaaccccgctgtacaaacagatccggaacacaatccgcagtcagatactctccggccagctctccgacggctttaagctgccctcggagcgccagctggtggaaaagctgggtgtccaccgcaatactgttaaaaaggcgtatgagatgctcattcatgagggattggtctatgcctccgtcaaggcgcccaggggttattttgtgagaaacagcccttccgaggtaaaacccgacggcaaaccggatacaaggaaagcattttcttctctggacaagaattttaattaccattttctagggacgcaaaatacgttccagcgtctgtataattcctcatacctctccgatagcatttcctttgccggcgttctggtaaataaagaaacacttccattgccttatctgcatgagattatggatgaaattacttccggtgatgacttagagccattctggttctgcgatccccagggaacggagcgtatgagagcatgcctggcatccctgctctttgggaggaagatttacgtacagccccagaatatccaaatcataaccgagacttacgaggccctgagcaatatcgccttcatgtatctgaaggaaggtgattttgcaattgtggaggaaccggtcatgcctgccattgtcaacatccttctgcatacaggagcccatgtgctctttgttcccgtggaaaaagacggtatccagatcgaaatactggaaaacctggttgaacgctatcgccccaagttaatctattccatgccaaacttccacaacccctctgcagccgtaatgagcctggaaaaaaggaaacggcttcttcagtgcgccctatcacacaacatccccatagtggaagatgactccctgttcgactttaactacagcggcattacacttccaagcctgtactccatggatcgcaccaactcggtcatttatatagattcctttaatctgtcctttttccccggcgcccgggtgggctatatcgtggctcctgataatgtgatcaagacctaccggcgtattgtgaataaggatcagatgtttctcaacagcttaagccagtatatgtgggcccgtttttttgaaaagggatactatgaaaagcacagacagtttctgattgacttttacagaaaaaaacgcgatctgatgtgcagcgccctctcctgtattcccggtttgtctttctctgtcccggacggcggtcttgttatctggatccgcctgcctgaatatacaaatgaccggcagattgccgcggcggcagagcggacaggactgcttctcatgccgggaaataccttttttgccgagggcagccatggagagtcttatatccgggtctcctattcctctgtcacggacgaagaaatcgcagaggggtgccggcgcatggcagaggtcctgaattcctgccggatctaacaaaatagtgtaccaatattcatattggtacacatatcaaaatcattatggtactttactcctgaccgtcttagtaataaaatacaaaatcataggacgcgcgtatccgtaaatgcagcatattttacttttatcggaaatcaggaggaaaactgaatggaagaattatacaagaaaacgctggaccggctgaaggccgagcttaagaaacaactgccggagatagaggcaaatggtgactggctctggcatcacccggaggcaggatttaaagaaacagaaacccagaaatactgtctggaggttctgaaaaaccatggctttgaggcctgtacctggccggatgtaacaggttttacctgtacctatgacaccggaaggcccggcccctgtgtgatgatcatgggagagatggattcacttatctgctattcccatccggactgcaatcctgaaacaggtgcagcccatgcctgcggccattccatccaggtggccacagccatgggggcgttcatcactctcacagagagcggcgtattagagaatttcggcggaaaggtcatgttagccggtgttcctgcggaggaatgcctggagatagagtggagaacccgggaaatccaaaaggggcggctccattacctttgcggcaaagcggaactgctgtaccggggcgcatttgacggcgtggacattgtcatctccatgcacgccggtctgggaaatgacggcacaatcaccatccttggctcccacaacggcttcatctccaaaaatgtcacattccagggacgatccgcccacgcggcagcggatccggaaaacgggatcaacgccctgtacatggcaaacacggctctgactgctctcaattccttaagagaaacctttaaggacagcgatactgtgcgtgttcatccaatcatcaccaaaggcggtacggttgtaaatgccattcctgaggaagtatgcatagaatgtctgtgccgtgccggaaagacggaaacggttctggatgtttcaaagaaatttgaccaggccatgggggcaggcgcttacgccttcggcgggaaggccctgattcgcacacagcctggttacctgccctaccgccccctgccggagcttgaccaggcagcggttcagacagcagacgatatcctgggcaaaggccgcgtaaacaaaggcggacataactgcggttctacggatcttggcgacttaaacgaggtcattcccggaattcaggtatttgtcaactatatgtatggggaccatcacggggcggattacaggattgcggaccggaaaatatatgaaaccgcatctttatttctggctgccatggcctgccgcctgctggatgacgggggcgccctggccaaaaaagtgaaggcggcccataagcccctgttcgccagcgccgaagactactgtacttatgtaaagtcccttgaaaccgagcaaattttaccataatggacaaacgaggtgaacatatggaaactccatccttaaaaaagaatctgccgctcttaatcacgctgacattgtccggttcctttatctgttctcttccctggttccgttcatactattataatccctttatggaaaccttcggcatgaccaatacccagatgggcctgtgcggtacggccctcggcgtaggcggaatcgccgcatacctgttcggcggaattatctgcgactacatatccatcaaaaaactgattcccgcagccatgatatcgacaggtgccctgggacttgtgatgctgaccattccttctcccatcattatggtaatcattcacggtctgtttgccatcacctgcctgatgctctttttcccggctcagacaaaggcggtgcgtaatctggcatctgtcaatgagcagggaaaggccttcggtatctttgaaggaggacgcggtatctcaaacgccgtatatctggcaatcgctgctttgattttcggccagatgacgattataaaaagcgaatcctttggcgtacgcggaatcattctgttctattctgttatgaccattctcctgggtgtgattgatattgtcctgctgaagggaattgacgatggcaaaaaaggtgacagcaatgatactgtaaacttaaaaatgcttacaaagcccctcaaaatgcctgcagtctggctgatgattggcatcatcttcgcgacattaaccatcagcaccggttactattatatttcaccttatgtaaccgaggtgttcggtgtcagcgcgcttcttggcgctgttctgtcctcttcctcacagtacatacgtcccattgcctccttcggggcaggcgtgctgggcgacagaatcaacaattccaaggtcatgctcattggacagattggactcgctattgctctggttattatcctggccgttccgtcctccatgggagtccttcccattctggtggcctgcctgatgattttcttctgcatgtatatgtgcgtaaccatgcattttgccattatggatgaggaatatttcccgcctgaatgcgtgggaaccgctatcggcctgatatgtgccattggctatctgccggaggccacatcaccctttgtagctggtgtgattctggatcattttccaggtgccgccggataccgcctgttctttgtctacctttttgccgttactgttttcggactggtactgactgttatctggctgcgcagaacaaaagccagacgggcggagattctggaaaagctgaaaaaataggccagacggcccagagaaggggggcaataactatgcgaaagaaactgtctgatatgacaaaacaatactcttcattttttctatgtgttatcctgtgctgcctggccgcagaattcattggtcccattaagctctccttagggaggtttaccgttacctttctgccgctgttatacgccatgcttcttatgctggtcctgtatctggcaaaaccggtccggggagtggggaaagcttatgttccggctgcttccaggatgctgtccatgggggttgtgttcgccatggcaaagctgggcatttccagcggcgcttccataaaggagatgatttccgccagtccaatcctgattttacagaacatcggaaacattggaaccgtgctttttgcccttcccattgccctgatattaggcatgaaacgggaagccgtgggcatgtgctatgcgctcagccgcgagccgaatgttgctctgattgccgatatgtacggcagtgaatccgatgaatttaagggcgttatggtctgctacatcgtgggaaccgtattcggcagcatttttatgagtgttatccctccgctttttgtcacccttggaatcttccgccctgaagccgccgccatggctgtgggggcaggaagttcctccatgatggcggcaggactggcaggtgtgatagaagcatcccctgccagcaatcccgacacgctgacagcctttgcaaccatcagcaatgttatctcatctgcaatcacagtctaccttgggatctttataaccatcccgctgagcaacctgatttataaggtcatgaaaagaaaaggggtaccatcatgagcgaaaaagtatcttttaaaagtctctgcgtggaatgggtaatttcactgactgtaatggtgattctgaccatggcctgtaatatcgtggggtatgggggacggtttctggaatccattcccggaatgctgattctgtgcgtaatcagcttccttggactgacggcaaaacacttcatccccagcaacctgccggctgtaacctatatcggaattatcggaatgctggccgccgtccctgcttctcccgtatccgctcccattatctactggaccggtaaaattgatttaatggcttccatcacccccattctggcctttgccggcgtgctgttaggcaaggactggaaagcattcctgtccattggctggaagggcgttctggtgtcgctgctagtgatcttcgggactttctttacatcagggctgatagcgcagttcatgggagccgggacagtctgacgcacacgggccgccggagtatgcccctaagcccgctgaaagaaacagatgaccgccagctgaatcaaaaagaaaaccaacaggatcatactgtatctgtcaactgcaaagggcataaggctgataccgttttcctcggtacgcccctgctccttcaaacaggccatatggccgcggattgtataacgctgagcctgttctcccgccggctctccaaacaggcagctgaatacataccctgccagaacggtcatcaccgtgccaaaggcagaattccacatccaggtaaatccggccaatgttccaaacagcaatgtgataatgaaaccaactacagcaccgcataccgttcctttgtcattggcctttttcgtgagcatggctaaaagaaatataccgcaggtagggccgcttatataggatatatagctgccgataaccgccaaaatagattttgaagtaccggaaaaggccagcatggtgatgatatataccaggattccccagacggccgataccatcatggaggtctttaaggaggcctccttttctttttctatatatctctcatatatatccttggtgaataccgtggacatggaattcagcagggaatccacactggacatggctgcagcaaataaacttgccagcagcagccccaccagtcctgccggcagtcctccgatgaaacggatcatcacatcattggcattttcaaaggcagccccgccaaactgtataaataacagcgctcccagaaaaataaacaggaaatagaggacattcatcatgataccgctcaccacaaacgaacgctttaattcccgtatggatttggccgtgaacatcctttgaacctgggcctggtcaaaggaaaaataccgtgaccacataaacagtccccctaccaatgccgcccaaaatccgttctcattggtcagggagaactgccagctggtgtcaaacgccctcagcttccctgcctgtgcagccatgcggacggtttcaaaaaatccgatatcactctttgagaacaggaaaaccattccgcctatcaggccgccccatattaccaatatctggatagcatccgtccagataactgccttgattccgccggccattgtgtaaaccaccgcaatcaccacaatgaccggtattatgatgtttatgctgacacccataaaacgctgcaggaccagtgaagggacaaacaccatggagctgacctgaatcagggagttgaggatgaagcccagcactgccgccatccgtgttttaggacccagccggagttcaatgtactcatatacggatgtcagtttcagatcgtacagcatgggcacaaatatagtggtgctgatgaataatgccaatggcactgtcatgttctgcatgaacggaagcagtccgctgtgatacccccatcctgggcctcccacaaagctgttgcagctaatcatggtggcggcaatggacagtccgattggcagccatggcaatgaacgctttgcaacaaaataatcttcctgggttttgttggtcttgcccatgataaatcctaacacaagcattcccataagataaatgaaaatgattgcagcatctatgattgtaaatgtcattgtcatgcctgcctttctattaaaatttttgtttggtccggttccgtattacggctgagccggcttacaatcagtcgtggttcagaatctgacgtgtcctctcaaaaatatccagtccctgctgtttcagccagtacgggaggtcgattaaaacccagttttcagaaagcttgtctcccctgcggcagtaaacatccaccacctgcatatctcctcttcctcctccgggtaagcccaaaaatcctccgatgggtgtattggtcaggttgggccagccgaagaagcatgcaaagttgccttccgcaaaccggcatacatgcccgttaaaggttttgtcctttaaatgattgcggaacggaagctggtgctgttcctggtagcgcggaatggtataggaagctccgattccccccggaccataccaaatcatatccgatgcccaggccttttccaaaacctcagggggacagcccatggccccgctcttattcagctcgtccaggtcgtctaccattttattcaccagtgcaagtgtttttatcccttcctcttcaggagcgtcttccaacagaattccatcatgatacctggggccggggtagataaaataatttccagtggaaggcggaagtggattttcgccggcctggatcatgagtccgattaaatccacgaacataccgctcttgcatatcttgccattctctacacagctgaattccgcataacggaggctggccattttcctggtatggcgaatccccagaaaatcctggtcgaatagacccatcagatgtcccatgctcataacccattcctcaccgctgatttcatttgtaccagcgataaagatgtcctgtctcctctgcatatggcggagagccttttttaaaggtatccagaatgactccgccacagcctccctgccgttttgctcacggaacgggtatacccccttccaattatagtcctcggtcatatattcccggaaaacctggagcacctgttccggttcagccttttccagtgcgtcaaaatatgacaatgctaccttttttgcttcctgatattgtcccatcttacaacctcctgtgtgttattcattatctgctgctttttcgtttttctgataagtttccggcaggaacatccatatgaccgcgcctgccacaaatactgccatggataccatgaagatcccctgcatccccgcagccgcggatcccaggcctgcaattgcaggaatggcaaaggtggatatgattcttcccccgttaaatgagattccggaggacagggcgctgaatttctgcgggaacaactccgtataataggcgccccaggcaccggaaaagccgaccgcaaaccccaaaaataccgataccagcttgagctgggtaatattcccggcccccagcctcataaagaggaatacaaacacagcgctgagcgccatgccaatcagaggttttttccgcccgaacctgtctgaaatgaatccccatatgttgtaaccgattaattgccctattccctgaaggctgtaaatgcctcctgcaactgccgcgctcagccccagggagtttctaagatatgtagtggcattgttggaaaatgccgagtaggccgtaaagttagcgccggagagcaggatgacccccagtccaatccacagatactttcccttatacatatttaaatagctgattttctcattctgctgtttggatacttcatttaactgcctggtattctggtaatcgttgggtacaaacaggaaaatcatgactgcccccaccgccggaggtatgatggctgtatacatcagcacctgccagttggagtcccccataaatgagtagagctgacccccgaaaatcatggccagggaaaagagactggtcagaaccgcagccagcttgccgcggtatttctgcggaaacagttccgtcaccagaggcatggcgcagccgaatactcctcccagggtaccgcctgtaatcagcctggacaccagccatacctgatagctgccgggtgtcatcatgggcaggaatgtggtcagcgcaatcagtgacgccaccacaatcaatgtatacttttttcctatctttgcattcagtatgccgaatacaatggttccgggaatggttccgaaggacataaccgcaaatatggtttccgactgctgtaacgtaaaaccgaaccctcctgaagctgcctctgcaatcatggtgggctttacaaaggttcccaccataaaattgtaacaataaaaaaagtatacaatgacaatggacaagaatgcaagactcctgcggccagccgacagattctttcccaatattatctcgttttctgcttcagacgtatttagtgcgattgcagacatttatctctctccctccgtcatgttatcttctgtttttgcatagctgtcctctgtttccatataaatctgtttcagtacatccaggccgtcaaatgtaacccattcttcctgaatctgatttcccgcaatacggtagtgattaattcctaatatatccaccggcttcatggacggcgccccaaacatgccgcggccttcatgcagtccgcgcagcctccatctgacagccacatcccattcatcatccccggcccgcctgttgcaggtaacacggtccacgctgtgatgcgcattggggaaggatgccaggagactgatgaccattccctgaatctcctcatatcccaccaggtcttttccgcatatatagtggaccactgcatccggcgaataataggccttaacctggttaatcatcttatagttaaacacctggctgtgcatttccagcatcatttccccgacgctgtcatcagcggccttatatttctcagggaaaaactgcccctgcatggattcgcccagtccaaacctggactgcagagcaggagtcttcccctttgcccctctggccatattcctggcaacctcatggacatccaatcccagctgctttaccagccacagattgtcccttaccagccattcctcgtaaatacggttgttttcaatggcgcagtcaatgacagtgcggaaattaacctttttccctgtggcctttccaaaatcactgtccccaagattagtggccgtggacaggaccctgtgggaggaaagatatccctttgtatcatgctttgaccagataacctgttcccctatcagacggcggtccggaaatgaatgcagggtcatcagcgtatttgcaaccacatccttgattcccaccagattagaggaagcacaatgcatggtcacatcgttatggtacgtgtcataaatgaccccgattcccttttcttcccatattctgtgggttatcttaagcacatagtccacaatgtcgcggtattcctcatcaaaccccggcagctgctgctttgagccagccagttccagatagtcattgtaatccgcgtgtctgaccgggttcacctcctccgtctcaccgtagtaaattttaccgctgccttttggcttttccttcattttcgttcccttctcctctccttttttcatatctgtcttacccggaatcaccgggtccggaatacctgttttttcatatgtacccggttccttttcctgcataatcataacgtcctccttcttttttcaaacgtttgaaattttggattaaaacaaagccttttacaaggctaagtgtgaaaacataagaaaccataaaacatcctattttacaggaccggcctgtgccgcgtcccgtacggatccccgtgtgattaaacgcgggtaaattttccgcggattcagatcttcccttccctcaatgcggcagacaagggaattaaccgcattggtaatcacttcttccctgggatctgcaatggtgtccagcggaatgtccagataatgaatcagttcaatatcattatatcccacgattgacaggtcctccggaacatccatcccatagtacttctttaactgctgtacaatggacaaggccggaaggtcctgctgggaaaagatacccgtaaatttgcgtatatattcaatattctgtcttacaaactccttctgggattcaaaatccatgcgggctgtcaataccgccggctctgcgccgtattccgccatggcttccatgtatccggccgtgcggtcatcatacatcttcagttccgggtcattggaacggatggtcaggattttcctgtgtccatgctccagaaggtgctttgtggcccagtatccccccttcctgttgtcatcccaaaagaaatgatccggtatatctgcggaaaaggaaggtttaaaatatacatatacatatggaatgccggcatcactcaggaatttatactcggcctctgtcagggttttagaaaaaataacaaggccgtccaccatcttcccattgaccattctgagtatattactctgggaatgtatgtttttgttgggctgtatcaaaaaatcatatccgcagttttcaactgctctggtagagtaggtctcaatctcattgaaaaaccagcggtaatcaggcgcattaaagttatctgaaaatataatgccgatacggtttgtttttttggtcaccagactgcgggcattggcattaaaggtaaatcccaggcgctccgcctcttctatgacacgtttttttgttttctccgcgaccctggggtcgttattcaaggacaaagagacagtggaatagctgacatttaaatttttagcaatatctttgatggtcatacaggtctctctccttctggatttcttactgaaagtataatttaaaacgtttgaaatgtcaatagacagttctattttaactatattttgtacttttcccacaaactgtattgtgtgttttatacaatctatcctgttttttatttttcttttccacagacacgctatgtttccggaaaaggatacacttcacagatacttctgcacctcctcacaggccgccacatgtacaaggcagtcccggtacctgtgccggagattgtggataccggatccttccttctttgcaaggggtgccgctgcattatatcctgacaaactcagttcggcaatatacgttttttagtgaaaacgcttggtcagcagcatattccgatacctatatatcaatccggtatatacgggtgggccttccctttgtccctgtggatttcatccctgtctgtaccgcatatcctgccgtagtcagcctctctatgatatggtttgtatggcggatctttacattgagacgctcggcaagctcggccgccgtaatttcgttattcccgcggataccaaggatggtcttgattttgcggaccgtccctggagcaagcattgccttcccggcaatttccatcaaatcctcgtcaaggggcacctgtttaagcggctctgtctcgggcatgagcggacccacaagagaatcctccaccacagcataaaccgctttgcggtaaacgccctcgcggagcgcctcaagggcactgctttttgccgtggacagctccggcgcaaccccataagcaacataggtacaaaagcgcagccgcttctgcaggtagtgactcaacccgcaatgcctgaaattaccagtcatacggctgacggttttcaggttcgtaaaaaggaacaggccgtttgtggtcttttgtatctggaaatcagcaagggtctccttcttatagtccagaaccgcctgctggagcagaagctcttcctcctcatccgcttccaccagccctttcacggattccctggccaccaccaccgcggctgccatataatctgcgcttttttgggcagtaatctgcctgaggagcccgtgaaccgtgcggagcagctgcttctctgacggatacaggaaggtatggggaatgccgcaggccatgagctttggctggactgaggaattcctggatatcacatacgttatctcccctgcctcccagcgtctcttaatctgggcaaaaagcctgtcccccagtccctcaatctccttaagggagatatttttccaataatccatggttttctgtcttgctgcatccatatccttaatatcaagcaaggccctgcagttgtgcttctcattcacctgcagatagatatccaccaccaccttagtgaggtcaaggcttctgtccctgtccaaaaggtccagaagcgcatggtatatctcttcgagctcagtatcgaacgcagccaccggcttgtcatcctccgggaaataacgctgtatggctgtctgcaccacaagtccgctcaaaagaaatccgtcatacttgtccctgagcttggggtaaagctcagggagcatggagagatgcccgtaatcatagagatcaagctttactcccgctgcctggcctgtggactcaagcttgtctgagagatatggaatcaggccaggggctgccaaaatcgcaagtttcatcatgtttaatcaccacgcagttcctttcaaatgattctgtccatttttttatagcatacggccaggcaaatagcaagcaaaaaagccaggtacatgaatcccctgactcttctttgacgaaacaggacttgccgttcaccctgatatggttggattcacctctctttccaacagccgcagggccagcctggtctgcatttcaacccccagcttgagacaggtttcatccatatcaaagtcctggctgtgaaggggcgccgtgatctttttccttctgctggcgcagcccagatgataaaagacacccttggccttgtccaggaaaaatgaaaagtcctccacccccatgctgggacacttcttccagtggatatgttcctctccaatgatgtcagaagctgtttccaccagcacatccaccacctgatccgtgttgataagggcggcatatcccggggtcaccgtgacttcgccgtttcctcccattgcctggcaggtgcactttaccatgcgggtcatggtgtcaatgatattctgcctcaccatccggtctgtggttctaagggtgccggtcatctccacttcccctgcaacaatgttgccggcagtcccgccgcatatggtccctattgtgagcaccccattgtccagcggggaaatacagcggctcaccagaacctgcaggctgtttatgacagcagcagccatgacaatggcatccacccctgtatccggataagcaccatgacagctttttccacgaagttttatgtgtatatggtcagaagaggcatttaaatcaccgtagcggatttcaatttcgcctgactcatgggttggcatcacatgcaggcctatgacataatccacatgaggttcttccatacagccagccttcaccatgggaagtgcgcctcctgtagtctcctctgcgggctggaaaaagaacttcacacacccggaccactctgccttacattccctcaggatgcgggccgcacccagagctatggacacatgggcatcatggccgcaggcatgcataaagccgggattcatggagccgtacgggcaggccggattctccgtcagcggcagggcatccatgtcagcccgcagggccaccgtgtttcccctgcccggtctgctgccctgaatcatggcttcaatccccgtgcctgctacaggatattcgtaggaaatcccccatccgtccagcagttcgcggatacgggcactggtccatttttcttcaaacccaggttcaggatggcggtggaaatccctgcggatctccaccagctccgggtatatttcttctatacgctgttttatatccatacaatcaacctttcaaaggacatccaccatcaatttccggccatctcataaagagtctcttctgcctgccggatacagtccgataccgttcctgccgctgcattttccagcagccaatccattgccgccttagtataagcagccgcgccccggtaaagataggcatcattaaactgtaccttgggattatgacatccccacttgcgtccctgacggctgtccccaaggaatatccagccaaagccggaaggaaccttttcggcgatataggaaaaatcctcggcacttgtgcttttgctgtaagctcccccccatgcagtgcgcatatcccaggcctcgtccccaaacatctccttcatggaacagagaaaggacttgtgcacgttgctgtccaccacaaggggcggacaggcagtgccgaaggtaacctctgccgtcacacctttggccttccccacatattccaccagggttacaaggtcctttctcagccgttctccaacctgcttgctgaatgtacgtatggtcccctgcataatagctgtttccggtatgatattggcgctgtcccctgcactcattttccccactgtcatggtacagctgtcaaagggcgaccggtgctccgccacgatttcatggattccctggtagattgcgcacatggctccaaggggattatgcgtccagtcaggggctgcaccatgaccgcccaccccctttatatggatttcaaaccgtccggaggaggcgtacaccgcgcccggcccaaagacacccacggtcccttcctttacagggctgcctgcaatatcatgaaacatgagcgcggcatccacatggggattttcaaggattcctgcctctatcatggccttagccccttcaagtgtctcctcccccggctgaaacagtatttttaccgtcccttcaatctcatcttcatggcgtttcaaaagctttgcagcgcctaacagcatagcggtatggttgtcatgtccgcatgtgtgcatgcgtccctttatccgcgaagcatacggcacaccggattcctcctctatgggaagggcgtccatatccgcgcggatgagaaataccttgcccggctttttacctcctgccagcacggcaacacccgattccccatactcaaggggctggtagccgaaatccgagagggccttcatcacataggcttttgtacccggaagggaaagccccagctccggattcgcatgcagatatcttctgtatgcaacaagctcgtcgtttaattggcatgcttcctcaagataattgtagttcattttagtctctcccatatcattttaaggtttatattcactcagtgccggcgccttgccagtcagacggttgcctccttcatggaaaccggaagctttgcccgtttgcggtttgcaatcactatgcttataaaaatcatcggaatggcaatcagcgcagctgtggacaccaccatccacgcgccggaatacccgccggtcttatcgaaaacataggcggaaaacatatttccgataggtgttccgaatgccgtgatgctctggattgtgccaaggtaacggccgtagtccttatctccgaatactgtagaaacaatgagtggcgtgacaatcgttcccacagaaccgccgatacaaaagaacatgaggtacagataaataaagtttgtactgtatatggataaaaacagcatgagcaaacagcagaaataggatgtcatgcccagtaaaagacctttcttcacaccaatcttatcacaaagtgagcccagcacgatctttcctatggtaagggaaccaatggcgattccggaaatgctggctgcctttactgcattaccattaaaaaggtctgtaagatatggggtgcggtggttggttacggacgcattgcaaatttgaatcagcatgattcccatcacaaccgtgaagaatacaatgctcttgattccctccttatagggtacgccggtcagcacggttttcccggcgcttgcaccggagcctgtactttccttttctcccagccgttccgtatatcccttttcctgtggacgctccacaaccgtgaaatagataaggggcagcataaccacaagcagcatgactccttcaaatatgtacgtctttctccagccgtaattctcacagagataactcagcaacggcgacatgagcatgcttcccactccggagcctgccagggcaagactgatggcaatgccctttttcttaggcccgaaccaccggttgataaggattggtactgacatgatggtggccgcgcaccatgtagcgctggagtaaacagacagaacataatactggcggatatccgtaaacatcagcggaatgaaaaatgtggatgcgactccggctgtggaaatcagcatgatgcgctttaggccgaatctctggatcagacgtccgctcatataacagctgatcaatgaaccaatacaggtaaagattgactttgatgaccagagtgaccggctgaagccttgctcctgcgtgattgaaattgtaaagacggatccggtggatgtggtggaataaaccagcgcatagataatcgcactgaccatgaccatgtaccaaccatagtaacgtttttctttaacagcgtccatgtgaatagttccccctattttttaattttggtgtatttttagcgtgtgctttaatattaggttaccatcacaccatattaatgtcaaacgatttttgtgccttatatacacatttgtgatatttatataaataaggtgatttattttgtggattctgtccatggaaaaagtatatcacagcagagttttggcttatattcaagatacttacagacgggattaaaataattgcggtaaagcaggggaataaacgggacaattaaaggcggaacacttaaccaaatgttccgccttccaatcacttatttatctatcttctgattgactgcatacagcacaatcctcatggtcacttccttctcctcatcaataaccagagtgaggtaatccccttctttttttaccacccttccaactacccctccgatggtgatgaccatatcccctgcagcaatggaatcatgcatctcttgcatcttcctgtgctttttcttattaggtatatatacaaaaacatacattgccattatgacaatgacaccatatgcaagaaacaataaccctggtgacatatcttaaaagtcctttctgagccgtatttattacattttgaaaaacctttcgactatacgcacaaatatggcggatccaatccagaatacgtcctcgtccacattaaaaagcggattgtggtgcggtacatccgtgtgtttctccgggttggatgagcttaagaacatgaatgctcccggcgctttctccagataatatgcaaaatcctctccgcccatatttggcgcatccagatggtcaatgaccatatcatctcccaccacgtccctggcacagtccgctgccagtttagccataccggcatcattgataacaggaggcgcaccccagatcatttcgtactcagcttcccctctgaaggctttcgcagttgcctctgcaatctcgccaatcctcttagccagctcctggcgtacatcttcctccaaagcccggatagtaccttcaatcagaacctccgacgggataacattataggcgaaacctgctttcacatggccgatagtgagtacggaaggcttaactgccgggatctcacgggcaatgatctcctggagattgatgatgatatgggctgcaatgttcaccgggtccacgcctttttccggagtggagccgtggcagccgattccttttacttttatcacaaatttatcaaaggaagccatacagcagcccggtacggaaatcacggttcctgccttgatgtccttggaaataatcgttccgatatgggttccgaacacagcatcagcgccatccatagcgccctctgcacaaagcctctgagctcctctggaaccttcttcatcggtctggaagagcagccttaccgtgcctgggatctgatctttatgttcacttaaaattttagccgcccccagcagcatggtcatatgcgtatcatgtccgcaggcatgcatacatccttcatgtctggatatgtagtccacctcattggcttcctgtatcggaagggcatccatatctgcacggagcacaatggtctttccctctttttctcccttaatggtagcaatgaggccgctgtccgtcttattctccacaaaaggaatccccagttccttaagcttttcttccacatacgccctggtcttgggcagttctccgcccagctccggaatctgatgaagctccctgcgcattctgaccagctcatcctgtaattctttacatttctcccacatgataatatattactcctttcctgaaattagattgccgcaacccatgattatttgacaagtccctttttatagaatactcttgcgattaacaaggtaccaaatacagtgcacacaatgactgctgctgccggaagcccggtggtcattttcagaattacgggaattgccaatgcaaatactgccacctttggatatttaaccgcaaaattcccgaaggtcgctccaaaaattgcggaactggcatatttcgtaagacctaccactatgaactcaggaagcacagataaaaccgctccgcctacaataactgcagaagtggtgcctatcaggtttgtaatgatagaaccgcagattgccatggtggaaaccacctctgcctggattgtacctggtgtggaatgtgtaacatccagggccagagccgcgcagggaaccctcatattgccgatatttcctgacaggaagctaaggtaggttccggtcataccaagagcggcatagtaggaaaccggctccacaaaataaaatgctccaaaggaagcagcaaccatgccccatgcagtaaggaccgtgctgattggcggccagcaatcataagtggtgcaaagccagattaccggaatgaatgaggtcagggcagccaggatgttcgtaggtgagccaataacaatactgctttttttccattgtttcatgatttcattatcactcatttatcttccctcctggtctatttgagtaactgatcatatcccaatgcgaatatcatgccaatgatcatggcgatacccagggaatattccatcaatttaggatattttttacatacggttttcacaagcaggaccattgaaacagcacctgtcaaaactgccagtgtatttcccatcccttttaagatttcacctgcgttcagataaccaaaaataccaagggagcacgcaccgctaagcacaaccagccatttcatatctccaccggataccttattgcgcagcgtctctaaagacggagtggcaacaccggtgaagagaagccagcctgcaccgtttaaggccatggtaaaccatgaaaccgcaagacagatcagagtatactgctctgtgcccagagtaactccacatgcttctgcaccaatattggctgctgaaagctctgtggcagcagcgccgatgatggaaagacggagccatgccatggggcctccgatggaagccataagtccaaccattacgataaacacacccaaagcaggacctatagcggatatcagtcccacgcggaaagcttccttgggaatcttcggatccagacctgccgccctggtagtcttgctgcactgcctcatgtaaagcactgtctgtatagcagatatgacaaccgtaacgccgcataagagccacagaataggtgaattggaaacctgttggacttgctcaatattactcatttcgcaacctccttgcataatgatggtatagtcaattggactacacgattaacgagttactataaatcttataaacatacacaccccccgtcagctgttaatttacatcagccagtgatgtattaaattttgtttgaatttaacagatttagaatcatatctgtatattcagcaggatcatagctatttccgactctttcatttgcgaaaatttcaccaacaactacttataatcgcggaaacaaactgccttttttctgttaatcccagctttttttctgcaaatttatatattcttctatatattatcattatttttttgcacagtcctggtcaaagtgcacatttttttcatttaaattcaaaaaactgcacattgcttaataatatgacagctgatataattacatctaattgttttagaaaggatggaacaccatggttacagttgcagattttacatcagaccttgaacaaatccgttgtgttgccggattttgcgggacaaacagagaagttacctcgttcaccataatcgacacacctgagattctggactggctgcatggaggagaatttgttgtggattccggatatatcaccagtcataatccatccatgctgaaaggttttatcgcttcccttaaggaaaaaggctgcgctgcgcttggtgtaaaactacaccgctatcacaacgagattcccggcatcatacttgacgacggaaacaaactggattttcccatatacgaaatgccatataatctttacttttgtgattttgcttctatgatttataaacgtatatttgaggagcagctagatgatatgtaccatgtttccattgcatacaaggatattgtcaattcattcagcaagtataaggtaccggagagaatgctgtctgaattaagcctggtgcttagaaatcctgttttcatgataaattcacagtttgagctaatagaatattcctatggtccaagtgatgatttttctttgcagaacctccttcacaaagaagttttgatggagctggataaaaatatacagaatactcttctgaaaaggcatcagcagcagccataccaattccaccaattctctatcagcagcccaaaaggtgaaataaactgtattctgttatcatcgggaaacattgacggagatacaacgttcttaattattccggagataaacaaactggaagactggcattacagggttgtaaaggacatatcggccttatttcaattaacagctaataataaagtaaacacccaggattttgcggcctccgtaatcatggcgcagtcaaattcaaacgaaacgattcttcgctattgcaagatgtacaattttgattactccaaacaccgtatttgtttatccatagaatttgacagtgaggtacccaccacatccacacgtaaatatataaccagagaaatcttctcgtccataaccacctggatcatgaacacctatggatgcaacgtttttttcctaaaaactcacacccattatgttctgtatctgctcttttctgatgtcatatcacaggaaacagcagaataccaggcttcggaagcagcaaaaaaaatctggcatatttttaatcacaataatatttccacatatattggtgtcagcttgtattcctctgatctacagcagatctcaaaggcgttttttcaggctatcgacgcaatgaaattgggcagaaaactctatccggaagaaaatgtgtttttattccgcaccatccaggtttatcaatggctctcgaccatgccccaggaaagtctggaggaaatgtacagagataccatagagcccttaagcaaggctggtaattccgatgtcaattatgtccatatattgagaacatatatcgggaatcattataacatcagcaaaactgcgtcttatctgcatatccatcgcaataccttgatgaattatctgaccagaattcaggaattgctgccttacaatatcgggctgccagaaaatatgctgaagctgcaaataggcatacatgcaatgtatttattggacagaaatatatagctatatactatcctttagattatccgcctgctcttggcatgcggctgtatttactgttataaatataaaagggggagtgaaaaggggctgtcctgaaaacgtaaatcagagataacctataaagaaacacccaaaagggaatccatctcccagagccacggcatctatgcaagccgggtttagcatatgaatgttaggaaatcaagttgaagagacacgaaagagctgatataatgaagttgatttaagaaaagcagctattaataaaaaatctctgcattttttctctgcttcttaataaggagaacgtttccatgaaaggaggccaaacccatgagccatgatcaacagctatatcagtatctgtatcagaccattaccacacagatatgtaacggtacttttatttatggacaggagtttccttcacagcgggaaatctgccagcgatacaacgcggggataactacggttcgcaaagtgatgaagctccttgctgaagaaggatatatccgcacagcgcagggacagccgtctgtagtaacttatcgtacctcaaaggaagcccatgccgaatttctggttcagaaccgtgaggaaattgccgacgcatataagggattggggttgctgatgccaatcctctatcgtgagggcgccaaacggtgtaacgagtcagatttgtattggttggataagattttgaatcatatatcagaacagatggaactgccagatcactatcagctggccaatgccttttttacagcattgctccgtccattaaaaaatcagttaatcatcgatctggagtttgacagtgaaaactatcttcacgtcccattcgtaccaattcccggcatagataatccttttgctacgacctttgaaagaacaaaaacttggttcagcaaagctatcattcaaattaaacagaaacagtttgatgacttttatgccgatgcgtcaaaattataccgcgattcaggagaaagggttgacaattacttatatgctttgggcaaatataccgaaagcaattcaaataagaatgaggacatccgctggttcagaataaaaggacattccgagctatattcccggctggcgatgaccattgtacgcaggattattgccggggagtttgacaacgaaccgtatttaccctctataccaaagctgatggaagaatacaacataacaaaaaacactgcaagacgggcggttagcctgctcaattcactggggatcgcacagacaattgataaaaaggggagtataattacgccggaaggatatacttcgtttaaaagtgagctggatctggcggagccggtgatacaggagcggctatcctttttcctggaagcccttcaaattgtagctctcactgcacgctgctgtgcatcatccatttcctttattccggattacctgggccagtccgtggaaagcaggcttcgcacagcatcggataacagaatcacccccttgtcttttcagttgcttatgaatgccttcattcagctcctgccataccaatcccttaaaaatatttttcggcagctagacgacctgctgatatggggacactatatgcaggcaattgacaagtcgtattatcctgattacagtgaaatcgcgctcgcaatggaagctgttatcactgccttgaaagcccaaaggatcgacgcattaccagatgcgtttagtaatgcgtttgccttgatctatcaagatgtttgtatggtcttatcaaaactcccctccggttccatctttaatacgttgaaggatccggaatgaattataatactgcaaaaagtaaagcaggtgcttcataagtaaaaaatgccaatataaaaatgaatatcttcactgttttctgtatgtacctcagagcaggccaggaatctgcatctgtgctatacgtgcagatattgtcctatttcacgcacaagctgtttaaaatccaaaggctttgccaaatggccgttcatacccgcggcctttgtgttctctatgtcctcaacaaaggcgtcagcggtcattgccaggataggaaccgtctttgcgtcctctcttgaaagcgaacggatagcgcgggctgcctcatatccgttcatcacaggcatctgaatatccatgagaatcaaagaataataccctggccggctctcctcaaaacgtttaagggcctccctcccgttgactgcagcttccagttccatcccgaatccgcccagcagttccagggcaatctcgcggttaagctcattatcctcaacgaggaggacctggcttccggcgaaatccagtggttccgtatccggctgtcccggcttcttttccagcctcaccagtttcgtatccggccgcatcaattcctcccctatccggcaccggttcatgcagtcaatcaccccggaccggcatagcggtttactcataaatccacagaccccccatgccatggctctttctttcattccgcttacatcataggcagacaccaccaaaggcaccctgccatgaatccccctgcagatcatttctgtcttctccatacgttcaacttccgccagacttaaacccagaatgataaaaccgaagttttctgtcccccaatgtgtcaggaagcgtttccccgcttcctcaaaatccgtgcactccacctccatccccatagaacggagcaaactgcctgcacacgcctgctgtacagggtcatcgtctatcagcaggacatgtaatcccctgaaatctttctgttcctcttctgaatcagccagaacatccatgggcatcagaacatcgaacacagttcccacacccaactggcttttaactgttatagtgccccccagcaggtcaatcagacgcttcgtaattgccattcccagcccgcttccctcgatttggtcgatacggctgtccctttcacgggtaaacggttcaaaaatctgctccagatattccggactcataccaatcccattgtcagacacggtaaagcagatcatggctttttttgcagactctgtttcctgtatctctatttttaagatgatcctcccgtctttgggagtaaattttgaagcattggagagaagattgagaagaatctggcggaagcggagcgcgtcactcatgaagttctcccagcccggaccttccaggtacacatcaaatctctgattcattttgcggatgcctggcagcacaattgtgataatctcctgcagctcatccggcagacacattggagccatgctgatagaaaaattaccgttttcaattttggacatatccagcacgtcgttaatcagccccagaagatgatggctggataaacggattttctgaagacaatccttcacacggtcctgatccccaatatgggcggctgcaatttcagccataccggtgatcacattcatgggtgtacggatatcatggctcatgcgtgaaagaaagtcagactttgccgcattcgcatattttgccgcctccagggcgctgttaagcatgtcggtccgctcttccagtttgcgctgaagttccctcaattctgtaatatccgtaatatctataaacatagacaggtacacggggtcatccgatattgtatcaatgcaggtgctgttgaagtggaaccaccggtcacggtcatatttatctttaatacgtatagtcgcctcaaggggctcccctcttctcagacccggaaaatggctgattattagctcccggctttccccggacatcacctccagcgggtcgatggcggcgatatcctccatgctgacatcaaaaatatccttaatccgttcgctggcgtcaagcattacaatcccctgcggcaggatgcggtgcctgactatgaatcccggaatattctcataagcaatactcctctccttctgggtctgcaccaaatctgtgacatcaatcattgtggtgtaggcaatctgtattccatccatgtattcatctgtcagaaaacccactattttaacccagcgcatggaaccgtccggcattttaagcggcagatatgcctcgtaacttttctcatccgcattggtcatactctggatattctcattaataatcctcaaaccggtttcattgtcccagaaatacgcatcgcagcagttatggaatctggtctcatagtcctctttcgtgtacccaatcatccggtagtaacattcattagcccagataacagtaaaatgttcatccatcaagtgcctgctgacactgacctccattgcactcataagcatttcctgctcgttttttgttctcattaattctgttacatctgtcattaccgtgtaagaaatgcggaatccgtctatgtattcatctgtaaaaaagctcaccagcttgacccagtagcttgaaccgtcctcatatttcatgggcacaatcgcctcatatccatccccattatttttcagaacagcttcaactttgcttgtcaggagttcccagccctccgggttattagcaaagaactcatccggatgattgtggaacaacgcctcgtatcttgcctttgaatagccaatcagcttatagtaatactcattggccaggacacaggtataatgttcatcaatcaggtgtttgctgacgcttatattaagcgcactcataatcatcgcctgctcctgcatcattttatcaaaatcctgcctggtttccttttgttccagccgggcctgcatcatatcagtcacatcaaccatcgttgtataggacacacggtatccattgataaactcatcggtaaacaccgcctgcatcctgacccagaaagtccctccatccggatatatcatgggaagatataaggaatagccgcttttcccctgctccagtgcagaatggacctgttccgtcaacctggtccatcctttgggattattataaaaatattcatcgcagtgattgcgaaacagatgttcatacaagggcttcggatagcggattagctcatagtagtaatcatttgcccagatacaggtaaaatgatcatctaccagatgcttgctgacgcttgcgcctaaaacactcatcagcatactgtattcagcattgagctgttcataactcaggttaatctccattcaggtgtcctccgggattttactttctcatcgcctttatggctattcagtgattcacgccggatttgccggctgtttctggggaaaaatcactgtttaagtattttcctatttccctccacaggattgctttgtccaggggttttgccatatgtccgttcattccggcgtctttcgcagcctggatatcctccgaaaacgcatccgctgtcatggcaaggatgggaactgccttggccccgtcacggtccatggtgcggatggctctagtggcctcatatccgttcatcaccggcatctggacatccattaaaattacgtcatagaaaccgtccggggagcgtctgaacgtctccaccccctcggctccgtcacttgcagtatccacttcagcgcccatgtcggccaggagttccctggcaacctcctgattgattgcattgtcttctatgagcaggaagcgcctgcccgtaaacctggctccggtatctgtcccctgcgttttcctggccagctgtccctcaagcacataccgctgcagcccatgaatcagggtcgagacgaatatcggtttctgcagaaaacctgtgacacccgccttttttgcatctttttcaacatcgctccaatcgtaagctgagataatcagtaccggcagctggccgccgcacaattcccgaatccggcgggtggtttcaaatccgtccagatccggcattttccagtcaagaagcaccgcgtcatacatttccccgttctgctttgctgtctttatcatttccacagtctggatgccgctgtcgacccaatccgcatggatacccaagtgtccgagcatctcagccatatactcgcacatgactgcgtcatcatctgtgacaatgattctcaaccctggaaattctccttttataaactggttctcttctattttcagtggtagttccaccctgaagcaggtcccttttcccaattcgctggtaacctcaatagttcctcccatcatatccacgaacctttttgtgattgccattccaagaccggttccttccgtcttatccacacggctgtcccgttctctgctgaatgccgtaaagatttgggccaggtattccggtttcatgccgattcccgtgtcagttattgaaaagctaaagagggctgttccgtccacagcctgcttctcgcagacatccatggaaacagttccattgacaggggtaaacttatatgcgttagacaagatattgataaaaatctgcctcatacgcagggcatcacttaaaaactgttcgtgcaccactgaccgcaggcgaatggaaaaatgctgctccttctcgccgaactgtggctgcataatggccactacattctccagcacctccggcaaggacatggaatcttccctgagaaccatttctccgctttcaattttagacatatccagcacatcgttaataagactcagcagatgctgccctgacaaaccaatcttccttaagcagtccttcacctttgcagggtcgtccaaatgggcttccgcaatatccttcatgccgagcaccgcattcaagggagtcctgatatcatggctcattctggaaagaaaatctgattttgcacggttcgcctcctccgctgtctccagggcagaacgaagctccttcgcctgcgcctccaatttctgctgcatctgccgaagttctgtttcgttggtaatatcaatataaatggccaggtacaccggatcgccctcctgatacccgatgcaggaggcgttaatctgcagccaggcgtcattgccagaccggttcttcatctgtaccgtaaaatgaaccgaattgccattggtaacagcatttttatgttccagaaataccggcatgttgcgtattatattttcacgaaaaagagcattatccatgccgtccatgctgtctttcccaaaaaagtcaaaaaaacggtcatttgcctccagcagcttaaagtccaggttccggttaactctgaacttggagacaaaccccggcaggctgtcgtaggtcactgactgctccagcttcatatccatcacatcggtaatatccgtcatgaccgaatagctgacctggtagccatccacatattcatccgtaagatatgcattcagccgcacccacatataatcatgatggtttccgttatgtttccgccgcatccgcgtaaccagattataggacttttcccctgattccagtgtctccattaccttggcgctcagctgcatccacagcttttcatcgtggatattcaaatcgtcattcatatagtaatgagccggcttattgtggtacaatgcctcgtactcctccctggaatatccaatcagttcataatagtagtcattgcaccataccagggtataatactcatccaatatatgcttgctgacgctgacatgcagcagattcatcagcgtatcatattcgtagcctgtccgtttgagcgtttcatttaatatttccatacttcctcctcctcagtgacccaacagggagagcatcatctttttaatcttcttccatgcgttaataacactccagagtggtcatggctttgcatctcttttgtaattatacatctttcatactttgactacaagtagttttgacaggcattggaaggaattgcattttggggacttcaggttattgaacagccttacccgcttcatcgcctcagcaagattagcgccatatccggcatacgcaaaaagccccggaaaagtcgtcttccggagcctggcatctatttcttatgtcctgaaaaggagctgtttttttattgagacaatgcttattctaatcaatattgtaaaatcttattgctccaactttaaatatggaaggaccgtacatgcaggaatttctgcggacaacgctttctggattgtccttttccatgggcaggcgcaatgcgcccagccccaatgctgataaatttaatgaacgaaactttttatagtacatggtcacccttctatcatcatcaacagcttccggctgcatattcctcataggtcttaacgccctgtttcaaacgctccaaaccatccagaagccgttctttcgggcaggctgtattcattcgcagaaattctctgccgtttccgccatataccataccggctgacaggtaaagtcctgtctcctttctgagataccggcataattctgacgcatccacaatgattttacggcagtccagccagagcagataggtggcgtgggccggtaccagagacatctccgggatttcatcgttcagaaatttacggactgttttcctgttttctgccaaatacaccctaagcgcatccagccagccctcgccttttgtaaatgctgcaatggcagcttcaatcgcaaaggcgttgggttccgctacttcatccgtattcaaagcgcgctccatcttgtgacgtagttcttcgtttggcaccatgacagctgctgtctgcaaaccagccagattaaaggctttcgttggagcgatgcaggtgatgctgttctgagcgcatgtttctgatactgatgcaaaggggatataaccgtaccccggctctgtcagatcacaatgaatctcatccgacataatcttcacatgattggccgcacatagctctccgattctccctagttcttcccgcgtccagatcattccggtgggattgtgaggattacagagaatcatcagagtcgtctgcggatctgacagcttcttctctaagtcctcccagtcaatccggtagcccgctccatcatagagcagcctgttctcgatgatgttccggccattgtttcggatagaattaaaaaagatgttgtagaccggtgtctgaaccagcacattttctccaaccgtcgtcagctttctgacgccgcttgaaatagccggaaccactccggtggtaaataccagccagtctttttccatcacaaagccgtgccgccgttcccaccagccggtgaccgcttctctccatgcgtccggaactaccgtatagccaaaaatcccatgggctgcccgtttcatcagcgcttccctgatttccggggctgtctcaaaatccatatccgccacccacatgggaagctcaccctccggtacatcccacttcatggaacctgttccccgccgctcggttaactcatcaaaattgtaaggcatcctacacagcctcctttaattcttccgtctgtatgaacgtttttgtcacatcaatctttgatgcatccataatcagttcttcgatttttcctgcccggattatgccgctgttgggatttaaaacgctgtcaatggtattgttcacctccacatccaccgtggaatattcaaatgcaagcgttgtatttaaaaggcggcagtttttcatcaccagattgtcaatgtaacacataccctggctgctttcaatggtacagttgatgagcgttaagttcttcgcattccagcctaaatattcgccggaaataaaggaatcataaaccgttacattttcactgttccagaacgcgtccttggacagcagccttgcgtgatgaatttccgcatttttaaccccatcaaaggaataatttccaaccagttcaaagccgtcgatataaagattgctgctgttcattgcaaaataatcgcctttcgcggatacctggtccatccggatctgatcgcagttccacagggtctcacctgcattcggcatggtaacgcgctccagttcgattccggtggtacggcggaaattttttggagcctccacaatacagtttttcatggagatattctccgtataccagattccggcacgccccatctcaaacagcacgcagtcctccattttaatattgtgactgtaccacagcggatatttccacttgaacatgctgcggtaaagctcaatgtttctgctttcctttaaaggggattccccatcagcaaaagtggtatcatagattttcaaatccttaccctggaataacgcgcgctctcctgttaaaaacttctgattaatctgtttcattttgtctgctcctccttaaaataatgtgagtctgtttcttaatatgaactatcctaactgacgaaaataacggctggctaacataagtataaactttaaataaactttgccgttttactctttttctttatctgacgatattttaataccaatagcatgaaatatccaatgcttatatcaaattgatttctatgctttttgagtatatcatatggctgggttttctggatttcagaaatactcagccattttgggtacgggcggttttaactgtctgcatctcactatttagaggcgattgcagcgaccggtatggttgtcaccagggaaattgccccggcctccttctaaacatttctacccatttcatatgcggcagacagcgcttccccacattcctctattgctccttttttgtcagcaccggttccgcgcacgacgccggccagacgggacttttcaaaacagctgatccagccctccaggcctttcactgcagcctccatagagctttcctcctcgtccgccgaagtggccagcagataaatgtcacggaattcatactctgccgggaacagcggattggtgcggtccaacaatgttttcatctgccctgacatctcatagaaataaatcggggtcgcaaataccaatacatccattgctttcatctgcgctataattctttctgcgtcgtcgcgcaggatacatttccctgtggtctggcagcccaggcagcccttgcagaattcaattttcttatcataaaggcagattttctttgtctcatgacctgcctcctctgcgccttttataaatacatccgccagtgtctccgaatttccgccgatacgggggctggtcgataaaaccagaattcttttactcatacatttccttcctttcacaaattctctctgaaaaagcgctccagcttatcaaagggaatccgatctgtcctgtcatataaatcaatgtgctccgcatcctccaccacataaagttccttcggctcctgtgctttctcgtataccatttcagaaaagaactttgagtgggcacggtcacctgcaataaagagaacgggccttggtgatatctccccaacaaacgcggttaagtcggcattcaaaaatgccagatcactggttgtagtaaatccgcctctggcgttcggatggtggcctctctttactgcgtagaagcggaaccattcagctcccggctccggcattccttccggcactgcatctatgggttctaccggaaaactgggaatatattccggatatccctgttcaaaatcttcccaccgtttcagagacagccgttctttcatttctgccagcgcagcttgatcctgcgtgccgcggacggcggttgtcatgacatacatgcttgcggttgccaccgctttgattcttgtatccgcctgtgctgcggataaagcgaagcctccggaaccacagataccgattaccccgattttatcacagtccacatatgggactttgactccaaggtaatccaccgctgcgctgaaattctccgtaaagatttccggcgacgaaagattcctcggctccccggcggactcccccataaaggactggtcaaaggtcaggaccacaaatcctcttttggccagttcattggcataaacacaaggcccctgctcttttacgccgccatagggcgcacccacgataatcgccggatgcgtttcgctgccatcgatcgcctttgcctgatagagatctgctgcaatggcaagtccgtaacggttattatatctcacgtgttttctttctacatctttacttaattctgcaatgtaatttgccatgataatgttcctttcttttcttccatatcttaccgcgcaaagcgcgccctgcccgcaaggcttgaattacggggtaccttttgggtatactttttatgccatgctttccttcaaaatctgtacaatctcatcatgggtcagtaccttatagccgccgtccatcacaaatgtaccgttcgctatgcccccgatcatttcctctgtgactcccagttcgcagatactcattacaaggcccagttccttcatgtagctatccatctgtttcaggccctccgccgcaagttcctcatcggtttttccggctgggtccacatcccatacattgacagcataccgttttaatttagcaaggccgtaaggcatcaggaatctgtaataggccatggaaacggcagacagtgtcattccgtgggtggcatccgtgtaagctcctgccggctgcccaatcatatgcaccatccagtctgttgtctttcctttggacaccagtgtatttaatgcccatgtagcggtccacatgatattgcttctggccacatagtccaaaggattcttaactgcaatcctggagctgtgaatcatggattttaacatcccctccatgatataatcggaagtattgtcatcctcaccggaaaagtactgttccagaatatgagacataatatcataaaagcctgccaccatctgatacctgggcagcgtaaaggtataggcagggttcagcactccttccttatataatcctgttattcttctttattcatctgaaacaccagatagtccaggcagtcaatccgcttttcattcgtatgtactttttccaacaggcgttttctatgctgttccaacagctttaactggttctgccggtttccagcgatgcctaatttcataaactctgccaccatctccatatcacatccggcatcctccagattttgaatcacggaatcagggttttccacatagtttgccattctaatctatcacctcccttgtctccatttccctctatacccacaaagcatcgtgtgttctacatataattgacacttattgctttattgtttctatgcagtttcgaccctgttttccccataagtttctgccataggcgcaatcatattttgtgttacttttccatataaccacattccaaaaggaatggacagcgcctccgccaccgcaaaccccgaccagataaccgttatatttcctatagctgctccaatcagaagaatcggtatgagcagaattacctggcgcatgaatgcaagatacatactgtagtttccatttccaaacccctgaaaaattgccgcaaatataatccccaccgacgatacaaaaaagctgaccgacataattctgaccgctggaataccgagccgtatcatctgctcagaggcgtcaaacaacatcaggattttatccggtatcaattcaagagaaatcaggaccactgtcatgattatcactgcataaagaaatgcgtaccggattgtctcatggattctcttttcttttccggccccataattgtaagcaataatcgggatcaggccgttgttcattccctggacgccaatctgtgccaggttctgaactttcatcaggattccatagattgccactgctgttgatgaaaactggtacaggatggtattgataaatattcccatgacggacatgattccctgtacaatcgctgtggggattccaactttcaggatattagccacatactttttctggatatgcagggtaaaatgaaccgggatttctttgttcctttttatattcagataaattccaagaagtcctcctgccagctgccccgtgacggtcgctgcggccgcccctgccgtccccatggccggaaaaccaaaatatccaaatatcaggattgggtctaaaatcacattcacgagggaagctgtccccagcgtggcaaggaacagattggattttcctgtcgcaatcaacagccggtcaaacacccactggagcatctggccaaaggaaaagagcatgcagatccgtatataggaaattccgtaccgcgcaatcacttcattcccgccggcctgccatgcaaagtatggttttacaagtaacaagcagacaattacattaatcagatacgctccgaatgccatgacgattgccgccgatgttgtcttttttacttcctccggttgcttttctcccatggctttggataccattgcgttcagccccacggccagcccgcatcccagcgcaatcatgagcatctgcagcggcgccgcaattgagattcccgtcagcgcatcctcgctgacacgggagacaaagatactgtccacaaggttataaagattgtttaccagcaatgatataatcagtggtatggacgtttttatgattaatcgggggatcggtgttgtccccatgatgctttccttctgcatattttcctcctcgcaaattatttgcttcttttatgtctttattgtaatccaaaatcatattcatatcaaatacttatattaaatacaatcccatacttgacaggcatatcacattctatatataatagacatagaagaattttcgtgtgtctggcataaataacaggaatggaggaatcagattggatattcgtgttttaagatactttatggctgtcaccagggaagaaagcatatcaggggccgcggagtccctccatatgacacagccaacgctgtcaaggcagctcatggacttagagaatgagatcggaaaaaaactgttgatccgcggaaaccgcagaatcacattgacagaggaagggatgctcctccgcaaacgggcggcggaaatactcgatctggtagataagacagaagcggaacttacggcgccggatgaggccattggcggagacatttacattggaggcggggagacagatgccatgcgtctgattgccaggatagccacggatttacaaaagagctgtcctgatatccgctaccacttatacagcggaaacgcggatgatgtgatggaacggctggacaaggggcttctggactttggaatcctcatcgaaccggcagatatgaaaaagtatgattatatccgccttcctgccaccgatacctgggggctattaatgcccaaggactgccttctggccgcccacgatttcatccggccggaggatatctgggagctgcctcttatatcctcccgacagactacggtcagcaatgaattttcaggctggctgaaaaaagattatgataagctgaatatcgtagccacctataatctggtatacaatgcctcccttatggtggaggagggactgggatacgccctgtgtctggacaagctggtgaacacctcagaaggcagccgcctgtgtttccggccgttgaaaccaaagacggacgcccatcttgacattgtctggaaaaaataccaggtattttccggagcagccgaccgttttcttaaaaatgtgcaggacgcttttcatagcagtatctaatcttccatgcagacctgccatatggcgtagaaaaacacgtgctctgcaaaatatagttactgtcaattcggacaaggacaggcagcctctgcaacacgccatgcagaggccgcctgtttcttttcccattccagctattccaaagaaaatgttactgtcacatcaccgcttccaagcgcttccgtccatccggataaatcatctattttgcccagcctcgtatagctccaggaattagaaccataaaatattacgatctgatttccgttatataaaacaatatcccctgactgcgtcgtggtttgactgttactggccggcagactggttccaatcgagcctaccttttcaaatccggaatagtcattcatctggattactacaggagcagtctgcatcatcctgacaaaagaatccactgccgtattatcctccagcgttgctgtaaatgtactgctgcctatctgtacattcatcattattgctctgctctcctccgtcgtcgctatttctgacgtctccattgttgtttcagctgtatgttcactcctggctgcttcttccggctgtagatttccggcactataggctgacgatacaaacatggcagccaacaccaatcccgcaaacagcttcttcttatatagtctcatgaatcctatttcctttcgtaatatttttaatcgctctttttgcaaacatcccctgcggctttcttccccttacatttcttcttcggaacttagatggatttttctcctcactccaccttaaaccggtatccggctccccagaccgtctcaataaacggtgaggaatcggcattcttctccagtttctctctcaaacggtttatatgtactgtcacagtcgccgtatttcctaccgagtccatgccccaaatccggtcaaacaatgtatcttttgagaaaacaatattgggattctcagccaggaaaagaagcacttcaaattccttattggccaggttcatttcctcgccattcaagtatacccttctttccttaggacggatggcgagattcttcacgataattgcgtcctccttttgctgctcccggtgctccagcagtctctcgtgaatctggatatgggattttaccctggctaccaattccgcaggactgaaaggctttaccagataatcgtccgcccccaggccaagtccccgtattttgtctacatcctcttttttggctgtgaccatgataaccggcaaatgcaaggatttccttacctcccggcacacctcaaacccacttttacccggcagcatcacatccagaatcagggcatcccagccgccggccattgcccggttaagcccctcatttccatcaaaaataagctctacttcaaaaccgccggcctccagataatcccgttccagttctgcaatcaactcgtcatcttctactatcaatactttattcatgctatttctcctctgtcattggcagatgtataataatcgcaaggcctccatgattttccgcatggacgattcctctgtggcctgatatgatctcctttacaacagccagtccgattccgctgccttccccagaattactcctggccccatccacccggtaaaagctctcaaacaggcggtccaggctttcttccggcacccccggcccatcgtcggaaaagatgaactccaccactgtactgcgttccacacgccttagggatatcaccacatttgaatggggatgcctgcggtagtgtatggtattggtaaacaggttgtccagcacgcgtttcatctcctctttatcaagaaggaccgggaattctcccccttcacttgtgagtttaaattccaccttattttgtctggcctcctcctcataagaaatcaggtattgccctataaacctttttaaatctgccggttccaaatggtaatggaagctgctgctgtccagccggttatattcggaaagactgtctaccaggcgagataaatcctttgcccttgttttgatggcggacagataccgctgccttttttccggggtattggcaatcccatccatcagcccgtccagatacccgctgatggacgtgagcggggtcctaaggtcatgggaaataccaataatcaggtcctttttccgctgttcatccttcagccgctgctccactgactcctttaaataggctctcatctcatcaaagtcccggcatacctcgccgaattcatcctctttcgtataatcaatgctggtatctaaattcccctccttgatttcctttgtgccgcggctcagtttctgcaaaggaaccagaacgctcttagatatccagcaggaaaggattccattgacacaaacagtcaggaccagaaatgcgctgataaagcccacgatatagttcaggatatagttctgcagataggagataacttcctggtcggtttccccagtatggaccgccaggatgcacacagccttctccccatggtaaaacgtatgcttcaccacagacacatcatggtagcttgctgtcagggtcttagccgattccatggctgtacctgctacagattccgccgccctcatctcctcctccgaaatataggaataaatctcatttccatttttggtaatcagaaaatgataccccattctggaaagtttattttccagatggttcattttgtcacttttcctgatttccgtcccggcctctctatgaaccccctgtccccagttattctcccacagttcctgttgataggtgtaaataaggctctgggccgactgaatcccattctcatcctgatacatggtctccagcgtataccagtaactgcccagcgaagtctgtaaacatactgcaacaataatggccgtcagcataatcggaataagcgccatcattacattagataatttgattttctgtctgattgtcattgcctgttttctccccatattcccattttttctccggaataaaaattgcggagcttttccaatcctgtacatgtctgcagcttccagatgtttttgtacggtatctgctttatataacgggaggagtcatgatgtgtttaaacaatttctaaactatcgagccaatcttaaccgttcagacatcctctgacacctatcacgatgccaaataaaatcatcagagccccgaaaatccgattcaatatgaaataaacatcgtccgtaacctttttccgatacaggctaacaatcaccgcgattgcaagccaccagatacaggtacctgcaaagataccacatatcagttggacattctctcccacagattcattaccgccaatcctgaacatggaaaatactaccataaaagataaaatcgttgcgggattggtaatcgcaatcacaaaggaggacaggaagcaggagaaaatatgtccgggatgttcctccttattgttccctgccgcactggcgaaggaatgactctcctttttcttgattgtgcggactccaatggcaaccaccatcagacagccaaccatgcagatagtgctctgatgtttcagcaaaatatccgagatgaaggtaagcccaaacacccacacacatgcgtaaaagatgtctgctgcagaggaaccaatcccggtcaaaaaacctgcaaatgcaccttgggtcagcacccgctgtatggataatatacccacgaccccggcgggtaccccgaatacaaccccgattaccaaaccttttaataaataattctccagcatattccttaccttttactccactgaaaacgaataatagttatcatagtcttccctgtgataataccggatttctccgctgtcctggctatatactatggtccattcagttgacgcaaattctccgaaattatttttactgacactgctcatcgcgtctttcatgttctccatatccatgaccggctgttctgacaaacgttctagtaacatttcatatcgtgtatgagactgttctgtcccaatcccatatttatctccctgggtcaggtaaaaatttgtcaccacaggagtttcaaccaccgacatctcgttgttcacatattccactgccaccgaacgaccgcttttatctgacagagccaaatgaagcatcatgcctgcggaggaatgcatatcatactgtcccaataactgaaccgcctcgtccacactggcggctttgtccagaagcagcctgacagcggttgtggttgtaaggtccgtctttccggtatcctgctccgtaaccgctgagtcatcaatcatcagcacggctacacagagaccttcttcgttaatcccatccattggggcatacagggctgcggccgatatgattttagatacggttttttccggatcgtattccgtacccagattcagaaaatccagatttacagtagaaaccgaagcatatcctctctccggttttgacttgacaaccatggaggtgcattccatccaatcaaagttcctgccatacatcacaccgcccttcggatttctggccgacagagtactgcatccgaagctgcctcctaaaaaacggggatatagaaatcctttgaacagagccttaccgacaaactttgccacatccagatcggaagctgctccaccctgttccagaaagcggtcgaacccataatcgtccctgtattccatataatagaaaccgtcttccagtttctgtacattgacagccgaatcaacgccagccctgattcggaaataaagataagcggcacccgaaatcagcagaattaacacaatcagcaggattcgtacaccctttttcattgttgtctccttcttttcattgcatctatttctcttgcaaacatttcttttccaaggattctcctttgcccctgattctgaccatgattggaattggattgaaattatgattccggcactccctgcttttcctggaaattcattttcttctctcccaaacgctgcaattttgtcaaaatcgtggaaaacaatatagagctggaccagcgctgtcagaaccgctatacaaagtgcctgagtgaaggaaattatggtcagcggaaccgtcatggtcaggcctggcagcaagatttttcaaaataaattcactaagctgctaatcaggacaatcttgttgccccaaccctccagtaccggattgctctccactgcttccctgaactccccggtgtcttcaatcgtcccaatctttgtgtattcctcggtaacttccccgtcctggtaaaacaggataatacggttaggctccgaataatatacctcacccgctttttctgcggtaaccatttctggctcagagggtatctcatagtggctgggaatgtcgtaatactgcattacttcccaattctcataatcgtcgtaatggtagattggcagtctccagttggcggttcccacatatccggcgattgcgtctgcggttgcattgtcctccatctgcatgacaaaaggggctccgtcatcgccaaaacggacttccagtgccgatgctcctgtgagttcctcccctgcttcctctgcctttattcccgcattacctgtgctattatcccgaccagcgctcattgtagtaccggcagatgtggaaggattgctgttttctctcctggtctcatctggtttttggcaccccgccagcatggaagccgcagccagggccagcataaatatgattgactgttttcttactatattctttttcatcctgattcctttcctgtgtctcgttctctgaatttctaaatgctgtattctgtttttttatttattatatatctgcggtatcaacgaaacaaatacttatatcaaatagttatctatgcttttttagtatgtgtcattccgttatcagcacggttaagtccactttttttactttccacgatacggcataggcaaatccggtaaacaaaaggatcaccaccgcggacggaaccaacgtattgccggctgtcataccggaagagaaattgctgatgcctgccattcgcatgacaatggacacaagagaatcggtcagggctgcagccagaatggttccgatgatggaagcaagaacagcaacaatcataaaccgcagggcaaatgtgcctcgcagttgtccactggtaaagccaactgctttgtaaatcccgatatccctctgttctgccgaaaggattttactgccagtcataattgtgacaatcagaataaaagccgccaccatcccatacaggaataccaaaagcgcctgcatggcagagatgattccatatagaccgggccatgtattctcatggacatggacatccccgccataagactcatcaagagccactatgatggcctctttctgtgaagcatcctccagaaaataatggtggcaccagatagccgggtcatccgatccgattttcaggtaaccttcccggctcattccgatattatcgcccatatcattggcacaggtataaatgccagatatcacatattcctcactgcccagatcagcctgtaccgtgaccgtatcaccgactgctactcccaggtcagaggccacaaactctgtcaccacgatttcatcatctgccttggaagtccgcccttccacaatgtggaaccgctccggatcggtgattgcattggccgtataatcaattccgttcacagacaccccctgcatcgccaggaggtaacggtccgtaatgccggtataggaaagcacggtttcttccgcttcctccggggtatgttccccaaaaatctggacgccgatatcgtgatccgccggattgaatgcatccatcatcccttttccgtccgctcccagccaggtatccatccgtccgatcatggaggcaaagaacaccagaaggattgccacaatacaggccccgctatatcttcgggcgcctgcggtaagctgacggagcgccatggagcattttagatagttcccccggattgggaagccttttttgactctgcttccgtagataaaagcctcacctccaattgctttcatcggtgtgatccgtttgagctttcccgttttaaatacaataaaaccggtcaataccaggaatagcagaccactgattaagaaacaccaggcggcaggcaggtctgtaggaatgcggattcctgtagtcgtaagtgtggccgcactcacaatccggctgacgtaaacagccgccaggatacccaaaaccattccggttaagatgacgagcatgtactgcgccagttgaatccggcgtaatttcccgcctgtaaaaccaatggttttcaaaatccccatattcacataatctgcctcaatggagcttcctatgccgtgtcccagcacgatcaggaccacaaaaataagtaccactacaaacgccgccaaaaggccgctgaaagcattctggagaatcagcatgaatccggcaatggcattcccactgtggaggaattccaaatactgcggcagctctgtattctcattaatgagctgattcagctgggaaaccgtgacaccttccccgtttgtgtccgcctgaaatatatgcagcatagctccgtccctggccagcgcatcaataccagtatcccggattgtctggatgattccggaataatcggcctcactgattagaaatcctttcattccgatcatggaactgcccataaatggatcttcataaaaccctttcaccgtaaagtctgccgcctgtcccccgcgggcaacctgaaatctgatttcatctccaatctgcacaccgaacatggaaatcatggaaggggagacataaatctctcccggccggatttccggtatatctccccggtacccggacagctcatcttcaaagaatttataccgtctatcctccgtcccatggggaatcagctggccttcactatcagaatcctggtcattcaccgtatagtccgaataaatgactacctgcgtatccacattaccaaccgcctccaagtcagcaatattgtccgccagagcatccatatcaggcacattggagacccatgcagtcagggtcccaaaccccgcccgctccatttcttccctgagatagcgttctgagttcatccatatagaaagaaccgttcccaacgccgtgcagacaagcagtaccaggataaatacgccggacaggctgcctttgtgccgttttagatcagccattaataatattgtatcttccattatagaaccccctcgttaccattggaaagaagcaagccagtcattgatcgctgcctccctcgtcctttcatcttccggatggaaaacaggcatggacagttcgtccagaatcttaccgtcctccaggtaaagaagccgtgtcccgcggacagctgcccgcagatcgtgagtaaccatcagaatgctctggccttccttatttaattcagtcaaaagatccagaacttcccctgtattccttttatttaaagctccggttggctcatctgcaaaaatgatacccggttcattgatcatggccctggcaatggccgccctctgtgcctcaccgcccgaaacctctgccggcatccggtccttggcgcttcctacattcatctgttccagcagggcttctgcctgcttcctggtctcttccggcttccgttccttccctaaatatcctgcaaccgtcacattctcgaaaagcgttaagttgcttaccagaagggtctgttgaaacacaaaaccaaattcccgtgagcggattttggccatctggctctctttgaaacggctaatcacctttcccttataaaccacagtcccagaagaaacacggtccattccgctgaggacatacagcagagttgattttcctgccccggacggccccatgatgattgtaaagtcatcctcataaatatccacggatacatggtccagcaccggaaccgctccccggtccttcccaaactctttgctgatatctttggcagctaataatgtctttttcaagtttcttttcctcctcgttatgagcacttagcgggtgtctgttggccgcttacgtgcgatacatgacactggcacttagcgaggtcctccatgagcttagtgcagtggctcattatgagcacttaacacgtcatgccacaataagccgcttttttcctgtcctttgatccggccggatttctcccacaaagcgaatggaaaaccttacatattccaggctcttttctttcaggagcagcgccatctgcttcatcatttcttcccggatttcttttatctttcctgtgtctgacacttctgccagcatctcaaaggaatgactgtccagctggcggaactggtaatctaaaagcccgtccaggcagaatccttcaatgacaaggggatgcagaaaatccctgtttccacgtccatcctcaaaccacatcatgtcctcattccgccccataatattgcctgccagcgtaaacggataggggctcccatcctccggttcccgtaaattaagctggtcggatatacggtatcgaatcagaggctgtacataattatagagggaggttaagtacatggcgccgttctctacctcgatataatttaagtcgtcaaacaaatacattccctccgcatgacttgtttccacgccaagggccagggattcgctggctccataaatattaaccacgtccgcttcaaatattgtctccagataattccgtaagctggcgccaagaggttctccgcaggaaacgatgcggaatatatccacgctgacttcacctttttccacaagttccccgagaatcttgattgctgacggataaccgatcaccatatttggtttaaactctttaatctggcgaatccatgctgcaaggggtgtcttgacatccaggaaaagttggtccgcatggacgccttctatcccgtcccccactgccatggccccgccataccggccgtctgttgcggcaatatacacgatccgcgggcctttccacagcaattttaatatctggggcatggtcatatcccagagcgcggcccggataatcccaaggagcatctggctccatgccgcctcatcataaacaaaatatcctggggtccctgtactgccggaagaatggaccacatggtactcatccttaaattttttctgttctgtgctttcctcccggtcaaaccggcgcaggtcctcctgctttaaatcggaaacagtaaccagttcattgaaatgctccatcaaaagctgtttatccaaaacaggaaatgccgacaggggcatgagcggaatctgctttcttgtaatccctgcctcctcaaagacccggtggtaatacgttgaattgtcataggcatacacaagcaattctctcagttttttttcctggagcgttattaattgttcccgtctcattcccgtgtttctttttaactggtataaattccacagtaaattaaagtaattcatcataacctccatatgttccactgaatacccagacagttccattcatactgtctgacattcacttaagcttcttcatttacagaaaacacataactgttcccatagttctccctgtgataataacaagccttaccgttgtttaaattaaaaacaatgctccattctgttgactcaaattctccaaaattgtccttactgacactgtccaaggcatccctgacctgatccatgtccatcgcctcatcttctgccagacgtttcatcaatctctcataccgggtatgggactgtgctgttccaattccctgctttcttccttcggccagatagaaatttgtcacagctggcgtatccgtcacaaccatttcgtcatcaatatactccaccaccacgcttcggccgcttctgtctgccagtgcgaaatgtaccatcattcccatagaggagtgcatatcatactgtcccaacagagccagtgcttcctccacattggccgcccgatccagaaacagccggatagccgtggtcgtggtaagattcggttttcctgtgtcctgacagatgacatcataatcctgtatcatattgaccgataccgccagacctttttcattcatgccgtcaagaggagcatataaggcaatcagggtacggacctcatccggcagttgtgaaaggcctgccccatagccggaacgaataaaatccatattaaccgtggaaacagaagcatatgcaccctccggcctggaacggaccaccatggcttcacatggctgccagtcaaaattccttccaaacagagcttctcccgccgggcttttcaccgccaaggtgctgcatccgaaaccgcctgtccggagtgacggtcgtgactcaccggccatcatatgtctggtaaggaaatcaatgactcctgcatcgttcgtggctcctccctgagcgagaaagtcatcaaaccagtaattcccgtcatagcttactgctgaaaaaccgtcttccagcttcatgatttcgcttcccggggtgatggccgcatctgatgctttcccggcagccgtaaccgtctgagtcaaagccccattgttctgtgcgtatgcggtctgctgtaatacaggcacccctcctgcacaccctgttaacactcctgttatggtcagtgttgtaaacagcagcattcttttcattttattcattctgtttatgtctcccctttctttatgtccattgtaataccagtagtatttaatatcaaatacctatactaaatatttacatatgcctttttactatggctttatccataacttctgatagaaacgccaacctggcacgttccatcttctactctttttctatcttaaaccactaaaataacgtccacctaacaaaataataaacttttcataaaccccttgaactttttcctggtttgaagcaatccatacaatgatgaaaaaatacagacccccgcagaaaggtctgtatttgaaaattaactttccatgttggcaatcacagtgctgtgcttattttacgctcttaatctggacaatcttattaccccagccccgtaagatcggattgttaacaaccgctttttttaaatcatcggcagcctcaatctctccgatctttgtatagtctccggtcacctccccgtccccatagaacaggatgatcctgtttgggtgggagtaatacacttctcctgctttttgggaggtcactgttttcacatcaaccgatggaatctcataccgcgatgaaatatcataatactgcatcacctcccaattatcataatcatcaaagtgatagattggaagcctccagtcggctgtccctacatgctttttgatagctgcggccgtatcattattttcaagtgtcattgtgaaggctgctccattatcaccaaaacgcacctccaactgggatgcagttacaacctctcctgtcatttccgcacttgcaactcctgtaagagctgctgtcaatccaatgactaccataagtgccacggcatatttttttaatcctgcattcttcataaagtgtcctttcctgtgctccttttaaagcgcacaaccgccgtaatccatcggttactgaaatgcttccgtaaagaagctctctaatttgtcaaacggaatcttatccatctgatcgtacaggtctgtatgggttgctcccggaattatcaacagttccttattatcaccctggaggagttcgtatgcatcatggctgtacattaaagaatgtgcttcctcgccatgcacaagaagaaccgaacttctgatttcaggggcatactcaaacaaacgcatattcatcagagagcccggagcggtagccgcccacccattattggaattgacggaacggggatgatagccacggtcggtcttataataagccacatagtccttaacatactgcggagcttcttccggtgcttcttccggaaggccgcctcccagcgtataagttccatttttataatcatctgttctctgttgattgtaagcaacacgggactcataccttccgtcctcatcaatggaatcaaaataaccaagtgccgtattccggctcatgtcgtacatcgtcatggcagccgtggctttaactctggtatccagcgctgctgtctgaagtgccataccgccccagccacagataccgataataccaatctgttctggatcaacattgtcctgggtggaaaggaaatcaatcgcagcctggtaatcctcaacgttgatatccggcgaattgaagtacctcggatatccgccgctttctcctgtaaaggatggatcaaaggcaatagcaagaaaacctcgttctgccatttcctgtgcataaagaccggaactctgctcctttacagcgccaaaggggccacttacagcaatggccggaatcttccctgtatattcttttggttcgtaaagatcagcagccaatgtattgccaaagtggttgacaaacgtcacctttctatggttcacttcatcactgagtggaaataccttatcccattcgtcagtaagttcaatcggttccaccttgatggaggtatcctccatcataccataatttacaactccgtctgttgtttcgtctgtgtctgcaacgggtgcaccggtttccggttctgtctccgatgttgtgctctgctgtgtctgctgctccgttacagtctgctggctattctgtacagagcagcctgtgcttacgagtaccgtgagcattaacgcccctgctatgattctctgcgaattctttctcattgtgttcttcctttcttttataattttttatgtaataacagattttctacaaatccggattacttcttcatacaaggaaagtggagcataaccactcaaaatgcagaagggccatacagtatctttaccccttaacccactaatcacatttactaaataaattccccttcctatatgttttatcatccgctccattttatagaactcataaactgccttgccctgtcttctttcggggactcaaaaaaatctttcggcgtattttcctctaccaccactcctttatccatgaaaattacctttgttcccacattttttgcaaagttcatttcgtgggtgacaaccagcatcgtcattccttcccctgccagctttctcatcacctctaatacctcgccaatcagctccgggtcaagggccgaggtcggttcgtcaaacaggattacttccggttccgtggcaatcgcgcgggcaatccccactctctgctgctgtccgccggacagctgatgaggataatagtcataccggtcccagagtcccaccttatctaaagccctcttaccggccttctcagcctgggaccttggcattttccgagcaatgactaacccctccgttacattctgcagggccgttttattccggaaaagattgtagttctgaaagacgaatgcggtctttctccttattttcactccagcctcagtttctgttcccatacgctctgaagcctggtcagcgccgtacaaaatatgaggtaaatgatgccaacctcacagtacagtgcaaatggttcatacgttctggcagcaattctctgggccgacatgaacatttccatcactgtgatattggctgccagggacgtatccttcaccagcccaatcagggaattactcagcggcggaaatgcgattctgagagcctggggcagaataatccgcatcatggtctgagtataggacaaacccacacagtatcctgcctccaactgtccggccggaactgcctctatagcagcccgggtggtctcggacgcataggctccggtattaacagaaaatacaactacggccgatgggaatgcatccagagttatccccaatcccggaagcccataaaaaattacataaagctgaaccagcaggggtgtccctctgattacccagacatacagcctggccagttgtttcagtcccttcacatctaccacctgtactctcaccgtcagctgctttttccccttctgttccagcatcttccccagttgtctgagcctccaccgtggttcctgataccgtagtttctgcaggtatggttcccgccccggcatttaaagaaccactgcccgccaaaagtcctgttgtcagtacagcagccgctgtcacaatccattttctctttatattttttcaaaccctcctaatcttaatatttattgaatccttatggtttaagccaatggaagccgattttgccgccccaagtgccctaccatagaagagaagcatccatatattgcatgataattggctattatctgtgccaaaatggcatattttcttcttcatttccgcctcctttcctttacatctattttattatgccaacacaataatatcaaatgcctatattaaatacatacgcataccttttgagtatacatattgataaaatttttctgatatcactatttcagatatcagcacataaaaatacaggccatagccagcctgtattttaaaagttgaggcattatcatgaattcatgcaatttgaatttcgtatcgtttcctatactaaagatatcttagatggaaaaataacacccagctaacaaaaagataaacttttcataaatttatttttatgcaacaatacaaaaatcggtcttttcagcttaaattcatcgttccaaatgaagtgatattgtcacccaagctgctgaaaaaataaaatcacttaagaaaccaccgcccgataactatcttttttcaagtcaatctgtggaatttagtcttgcatacggaatgtaaaatttcatttcatccttttcttatttcttttttttgttcctataatcaataagattccagcggctccgaatatcgacactgctatggtgtttttttcaattatatcctttttgtaagatagccctattcctgactgattgtaggaatttgatgcccttacaacatcatcataataataaatggagaaaccgtttatgttatcattattactattctgtgcatttgaaggtgtagctgttttctccctattttttgctgctgtaggccattccccaataaatgcatgtgtcgtagacttctgcgcaggaatcacaaattcaggtttttcatcagcattaaatatgatagctgcaggatatcgaattccaggaagtcctgaaacaacttcgtatgaatactcatcactgttgtaccccgcctcctcaagagaagttgttacagtattgtcataatcaaccgtttctgcatcatatacatagacagctcccacagtccaaatatttaatttctgtttgagcgtttcttttgcatcttccggaatatcatcaggaatggatgtcaccttggttatatcaaccaaaatcgtaaaaccgtctgtgtatatgggaatttgccacttataataactgttttccaatgattctttaacatcatttgtttttaacaactcggaattggcataaactttatatgctctttccatttccacctcatccgcttccacatcccggttgagttctccacgtgctccaccataattgatatgatataaaacctcatccttcatagaaagaatctcctgatactcgtttccttctgaaggtatcaagcgttctgatgcatatgacgtaaaactgagattaagcaataaagagatacaaacaaacatgccggtgattcttctcataacatatcccccttttctgatacaggatatccaggtcctccagcttctgttacgcggtctggttaacccagtttccttttttcagtttcggaatctcttgtcgcagcgatggctgctgctctccggtatcttccacggcagtctgttcattgctggccgacactgtggttggattgcttatgatgactgctgcacatatcacatagaatatagcctgttttaaatctgtctttttttcatcctctgttctcctttgacttgtccggaagcacatagtttaccagctcagtataccatacctgttctttctgagtaaagtatgctgttagggtgtcatgctttgcctgaaatgaaaatttaaattccacttccctatcccacagtagaattaagtcttacataagtagaattaaatccttcacagggtggcttgattcattacgccttttgtagtaacctctctatcgttgtcctggcggcggtagtaggaggtatgttatgtccaagttaatcccaggcaaccacaagtaccttactctcaatgagcgtttatacattgagcattcctttaatgaggggagctccctaaaggatatcgccagattcctgtgtaaagaccccaccaccatctccaaggagatcaaactccatcgggttcagaacacctggaacaaagacagtttcaataatccttataacttctgtatccatcggttccgctgtaaaaagacaaatgcatgtgagaagattattctctgtgatacgctgtgccgttcctgcctcaaatgcaatacggtctgttcccgattcgagcgggaatcctgttctcggttagacaaggctccttttgtctgtaacggctgccagaaaaagaaaaacctttgtaccataccaacgaagtatgattacaatgcccacgcagctcagcgccattacgaagaactccgctcttcctctcgggcaggtgttaataaatcccgttcagaaatgcaccacattgatgcggtggttaccccactgatccggcaggggcaatctccctacatgattcttaccaaccatccggagctcggtatgtccgttaaaacgctccagctacatcgatcagggctatcttcttacccgcaatgtagacttaaaacgcaaggctaaattcaaaccgcgcaaaagacacaaaacgcagattacaaaccgggaggtctttttaggaagaacctatgcagacttttccgcattgggactttcgcggtccgaattcgttgaaatggacaccgtggtctctgcaaaaggatccctgaaatgtatccttaccatgtacttcccacatacagaattacttctggcctatctcatgaaccgctgcacccccggtgctgtccgacgtgtgtttgaactgctgcaaaaatccctgggcgcagcttatgaattcaattctgtatttcctatcattttgactgatcggggcggagaattcggctccccggagcgcctggaaacggatcctgacggcatacaaaggaccagcatttactattgtgacccgatgcgcagtaaccaaaaaggggggattgagaatgtccacacgatgctccgcatgattcttccgaaaggaactgtgttgcgtctgccccttcgtcatcctctgtgcaaacagcctgaaagatgttaccatccaagagcaagtcattccctcttgccaatatggaagatgaaataggtatttgacaatgttcaaagggtccaagtcatcatatcttcgctttaatttcattcagcttttgctgacaacttggaaacacgcttttggttttcatcaccttcctgtactggcaattcagcccctcaatgatattggtcgtgatatcatgatgtcggtatagcacgaccaatgcaattgagagtctgaatgctgcctaccgaaagctgtaccgccagagaagtgtatttccaagcgatacggcccttttgaaggcgttgtacctgtctacgtttgaggccacaaagaaatggtcgatgccgatccggaattggggacaggtttatggagaactaagcatcatgtatgaaggccggctgcctgaataagccaatttactgtatgttccacaagcggatttctcgcctgctcttgacaagcaacagtagttgctgttatatataaagcaagggctgaaagcccaaaaggaactttcagcctgattattatcataattccctgcgtcgtagacgtcatagcctcgtccagccgctctgcctcccggacaaagacatgcgaaatatcaaatgcctccggaacatctgcaagcgtacaaacactcacacagtaattaatccatggacatcttttcatcatccgatacacgatggtcattacatcaggttctgacatcggcataagggtatgatatcctgagccctggatatgttcaaagccatttttcttaaaaaagctcctgacatcatggtgtgcattaagccaatcccctttttgtataatgtattttcaacgcgtttgtatccaggccaaaatttatccttttcttttgctgaaccattataccatacactcctcttaaaagaacagacaacgacctctgttaaaaaagccgccatccatcaggaagtggcgcaacagccacagcagatttgtttattttccatgtacctttccttcattttgcgttatacgctttgcatgatttcaacaatttgctcccgcacctcggaatatcgtttttctggaattgggattatcatgcctgtaaccatggtaatgtgacagcgttccacagaggaaataaactcgcagttcaccagatatccccgatgcggcctgcaaaaattttccgggcacaggggtgctacctctccaataatccgtttgatcgtcacgctcttatccacaaaatgaacgactgtgtgcttcccgattgcttccatgtacaccaccatatcagaatcaatatactgcaagcccgtgtcattgcacagctctatttttttgtgccgctttttcacgctgctttcagccactaacttttgcacgtaacgatacgtttgtacgctgaccctgacagggaacacctcatcttccatcaattcattccattcgtttgatacgtgtaaatgcgttatttttacaatcttgtttttgccggactgtctgaagtgaacggtcaccctttgatatgcagcagccactttatctgtgtcctgcccggtatgagcagaaaagcggcccactacaatgcagctgtcccttcctgcctgaagcggataaaattcaatattttccatgtcgatacgcggcataatgaatccatctttgaaatagctttttagcgctatcttaccaaacacaaaaatgttccccgggccaatccacatgacatcggtatcaagtacggaaaagaacggctctgtgttaagatgataatattcacgaaacatatattcggtgtactgcaccacattttccattgtcaattccactctgcgtcctccgtctgattgaatcttcttattcctattttgccgcagtttctgttcttttgcaaacagttaaagcgttttggccgttctattctgccaaatcagtgaagctgtcatcggcaagctgtgtcacaaactcctgtgtactctcaataaaggcaacctgggcctccgcatttttatttatcagaaattcgctcagtccatatttccttccgttatccgaccagtcataggtatagcccagccgggtccatggataagcgctgtcaaaatatgaccagatgatgttgccgtcaaaccaagtcttaaaatccttatccacattctcatcaagcttcgttttcatgctgtcaatggtgggatccggttgataggcgggcggaccacatcttcgggacgcacccacaagccggtgaccgtgctgtgatttgaatcaggcaggaagccgattaactgcttcaggtgcagattccagtcagtgaccacagctttcccggcatcgtatttgccctgcagttcccggccggtgaaggtccagaccggcccccattccagcgttaccgtctgtccggcaggataactgtcgggatagttgtgccatgtcagcagcagcacccggtcgcccgcgtcattccatgtgacgcgcgaatcctccttggtcaaagtaatcagcggcataatctcatccttatccgcaaaaacggcatcctttaccgccgcgtcatagagctcctgaacggtttgcttcgcgtcgctttctccggatgacagctgaccggacacttctgaaacaatgcctgacacatggtttggaagcacgccgtttccctgtaaagccaatgtcagccccgcgcccacggtcaagccgatcaccatcagaatcacaggcagcagccagcgtggtatatttcgttttgtagattggttcattccttccactattatttgaattttttacatatcgtcaatatattttttccgttttgaaactcataagaaatatcatccatcattttttgcgcaagaaatacgccaaggccgccgatttgccgttcttttgcactgacggtgacatccggcttctctttttccaaaggattgtaaggcttgccttcatccacaaatccgattacaacctgaagcggatcgccccccaccgcacagcggatcgtggcttttcccgttttgggatggtaggcatagtgggcaatgtttacatagatttcctccactgccaaatcggtctgcatgattacctttggcgagcagccggcctgttcaagctgcccgttcacaaaatccgttacagtatccaggttctcaacggttgcgtccacagtcaattccatcatctggattcctcccttccgccagcttcagaaccagcatggtaatatcgtcaaattaaggctctttccctacaaacgcatccacatcgcacttgatggaagacagcagctgttccgacgtgtcataagccgctgcatttaagctgtccctaagccgtgtttctccgtaaagcatttcctctgagttggcagcctcggtcacgccatcggtatagagataaagcgcaccgccggggtttagctgtaattcaccggattggtagcgggtgccatccattcccgccagtacaaatccggagcgctgcttaagatactcccatgtaccgcttccctggcggataagcggcggattatgtccggcatttacaaaaaccatatgtccgctggagatttccagcactcccatccaggcggtaacaaacatccctgcgtcatttgtctcgcagagctgctggttcaccttggtaaaaacctgggccggagcggttcaaagggcgaatgccttagccgagcggccctgccggtacagccagataccaccggcataggacattgccataggcagaagtctactaagcgtattgcaaaacagatagataccattgaaaaccaatgaaagcaagacatcatcctgccagcttccttctcttggcgccagaacatgaagaaccagcatctccgacccaaaggcaataagctgataaataagagccgtggagagaatcacacagacccatttccagatacgtgtctttctgtctgctgccgttcccagcgtcacttccataactgccatgcagaaaatgcctaccagaacctgctcggctatgcccagcacatccaccatttgcttcagttccaaccagaccatttttgttccctcgtttaggattctctgggtttgtagatacaaactactttatcatcactgcttttatgataggacaccgtaattggaaaattccggccggcagccctggttactctatcgttggacatggcctgctcttcgaaatgaaaatcatcagccgtcagttcaaatccgttctccttagccagtgtaataactgtctcggccagtgtctgatcagtagaaactttttctaaaaatcttttcaaattttcttttgacattaaaattcctcctattattttaaaaatcacccactttgttgccgaaatcactcggcaaatctctcaaaatttgcggcgaagccgattgattttattttcattttcaggaggtgatttttttgattcttgggctatcatcattgagttttggcatcttgattggaattagatttatctaattccgagaacttatcaaagtcctggaggtaacattcatcttctttttgcccgtcatgctaattccacacgcctccctgttggagtttttcatataaatcaggcagatatttttttagatacatcttgtccagcatggccggagacatcgcaggtacaccacccgcaaccgcacttaatgcctcatccccaacttgttccatgtccccatgagggattggtgggaagtactttctccgggctatccccctgtccctttgcgtctttcagacgcatacgcgcgttgtttaacttatcttctgaaagatgtaatgattctattatctcctggatgttttcttcggtcaattttgccatacttgtttcctccatttcttatgtacccactgcgggtcagtttttaccctcatctattcatcgcttaaaggctgtgcagcttcgataagatcttctctggttagcgggctgccggcttttcctgccaatgcaatgaactgccggatatgtgactccttcagttgccacagcttttctgctatttcctcacccaccatggaataacgtttttcatggatagggagcattatgaaggttttcaatggttgcggccacagtcaattcactcatatcagaacctccctttgttaagcttaagcgccagcatggtgatatcatcaaattgaggctcatcccccacaaacatttctacgtcattcttaacgacagccagcagctgttcacaggtgtcataaactgctgtgtccaatatctctttcagccgtgcttcccccaaaagcgtttcctcagaattggcagcctcggtcacaccatctgtatagagataaagcgtatctccgggacttaactgtaattcaccggatttgtagcgcataccctccattcccgcaagtacaaaaccggaacgctgcttcaaatattcccagcagtcagttcctttgcggagcaggggcggattatgccccgcattaacaaaagtcatatgtctggtagaaatctccaggacacccatccaagcagtaacaaacatcccctcgtcattggattcgcagagctgctggttaacctttgaaaaaacttctgcgggattgatgcctgcctgtgtgtggtctttcaggagtgtctttgcaatcaccataaagagtgccgcaggcacacccttaccggatacatcggcaatcacgattgccagatggtcgctgtctaccagaaagaaatcataaaaatctccgccgacctctttggccggctgcatggaggcatagatatcgaactcgggacgttcaggaaaagcagggaagatacaggggagcatactggcctgtatatgtgtcgccacatctaactccgcaccgattcgttccttttcggcagtaacggctgtgagatcatcaatataagtataaatatcggattccatctgccggatggaacggtaaagatggcccagttcatcccttgtatccataccggacagttctaaaacgccgcgcacaccatccgcccgctctctgcgttgtacaaagtcaccggctgctgccgccaaacggttgatgggcgtgaccagcatcttacgggtggcggccagaagcagaaccgccagcataagggtaagcccaatcagaattccggccagcttgacaagaaaattctgctccatagccttaatttcggtcatggagagatccacgtctacatagccgcgcattgtgccgctggcatccttgatgggcaccaaagcggagatcaaccagccaaattcgtaattggtgataatcggttcaatgatatttcctgcgagaaaattctgtttattatccagaaaatctccgggataaaatttttgaaagtcgcccagcgcaaacgcctcatcactctgatcggtatcatatatataataaaaaccatcttccgtgggctttgttaccacagcgtagacgatgttgttgcttttttgaatattgattagatgctgccgcgtttcccggtaagcatcatcctcaatgccgctctccaaataacggtcgatagaatcagcgtctacctcggcggccatagtctgcgccagattaaatgcgttttgaatcagctgattgtccaacgcctttttataagtctggtagccaaaaataatggcaactgcactcaatatcgctgcaatgaacacaatacctatcgccgttttaacacctaaagagattcggattgtcttttttgctctcataaaacgtgtttccttcccttatcccgcagctacaggatgatgaccaatgtattaaatccctgataacgacgataaaaaaattcctttgctttttttcggacaatcagcattcccaacgcattcgggccgtcgccctcctcggcggaaaagggattaaattcgtaggaattgtccctcaggtgtaacgtaaaaccgttttggtccgccaatacggtcagcttaatcagcacatcactccgatggttattttttgcatcttccaaaatggccgcgcagacctcctccacaaccaatgtggcataatagctctgctggctggtgcaatcccactcttcacaggtgcgctgaagctgctccaccgtgccgcccagcaatccggcatcctgtatataagcagagaagctgcgaatcacaggcgatgcttttggatccgcagctgaccgcccgaacgctttatgcctttccgagctgaagagcacataacatagtgtcatcaattcggaaagcgggaatacccaccaaaaagcattcaaaccgaatggtgcaagtgcgaacatcggcgccagaaaacatacaaacaaacgcagggtctgaatcaccaaagcactgcactcacgctgtgttgtctgttggtaatagatggcaatctggttccacagagatggcaggatactaatacagtaaatccgcagagccagcgaacctgcctttcctgaggcgtctgagagtccaaacagggtgcagagtggtgcagctcctaagcccagtcctgcgattacaagcagagccagagcggaaccgtactgcgctgataactgaagtgtgcgtttgacggcaggggcatcccgttccgcgcggtaagtgctgatcatgggctgcatcgtcatcccagtgccgtccgccaccgcggcaaatagctgggagaggttatataccacgtcaaaaacagctacacccactggcccgccgatagaaaagagcagcgtgttggcgcagagcacggtgataaactgataaacatactgtacggctgaggaaaatccggtttgcatacagcggaaaagcccatgcagatcaaaagacggccagttaaaccgcagcatcccatgttttccgaggatatgttttccgcagattgcaaggcaaaatgccgcaccgattgcggtagaccacacggaaccttccgcccccatattcagacgaatgacaaaaacataattgagtacgatgtccacgaagttggaaaccgtcaatgcagccgccgcccgcctgggagcaccgtccgcatggacaaagtagtaaaatgggccctggcaaaacatgattggaacacagacgagctgtgcacggacatatcgctctgtgatagcgtacacacctggatagtcggaactcgctcccaaaatacctaaaagctgcggcagaaagatcagtcccaatgccacagttacaaagtaggctgcaatcaaaaaccgaagcacattgccaaacagccgattcgcctcttccggctttccggcgcccatgagggatgcataatggatagaaccgccgattgaaaatccatagctcaacaggttataaaacaaataaaccgggatgccaagggagatggcggacagtccttccagcccaagcttagaaccaacaacgagacagtccaccatcccgcccagagccaggcttaaattagacagaagcgacgggatgaaaaaacgccgaaacgccttgtccacaaatagccgttcctctccggccattgcaccggtgcggaccgcgctcattcttcaatcgtaaggatgtcactaaagccggtcacctcaaagacctccataatcgtctcatttacatggcataccttcatgctgccctgcttgttcatccgcttctgcgccgccagaatcacacggagcccggcagatgacaggtaaaccaaatccttcatgtcaatcaccaaatcaaccacgtcgtcaagaccggcattcagttgcgtttccagctccggagcggtgctcgtgtcgagccgcccctccaaagccacgataaatgcggagccttcccgcagtttcgtaatgttcatacagtatttcctccctttttcaccgagctatgcggcgctccatcaccggcggcgtagagaccgacaaaatcatcatcagaaagcggtgtcatttgatcttgactggctgcacgtaagaactctttgcggagctgctctttgaaatcttggttctcctcagtaaaatcataatctgcacgacttgaatcaaatgggcaatctgatttttgtgacatacgatctctgcctccttccatttttattttggaaaacatctgtccaggtattgcggaaaatgttcttttacaaattcataccccgtaccagagagcagctgaatgggatccatacccccatcgcggccgccgccggccgctgcttccacctcttcatcacttaaagcttgtgctgcttcggtaaaatcctctgcacttatctcaaatccggcttcttgtgccagcgtaataagcttctcaatacatgactgttccagtccctccagcttttttgccaattccggcgtagataccgcctcttccagaaacttttgcacattttccttcgacatatagaatcctcctgtcatttcaaattagttccatttccggtcccagagctgtgcttgtaccaagccgttcttccaacgacacgggaagcacgaaacctttccgatgattcattacttcttttctcccgattttacaggcataattggttttcctggggagcgcctagtggcgccgccgccagtgacctgactgagttcctcctcggttttcacctgcacatcttcctgtgtgtcctgtttcttcattttttcttccatgacgcttgtctcctttcattcacatatgatggcttgccactgttttttaggtatttttatatacgatggcatttgctttttctcccacttgtatcataaaattttgcgttttttatgttgcaggttccaaagtttgccgtttcaccagctcggcaaagaaaccacccgccgccagcaattcgtcaaaattaccatcctccacgattttgcccccatccaaaacaaggatacggtcgcactgccggatggtggaaaggcgatgcgcaatcacaatacgtgtacagttcaggtcattcagtgaatcggaaaccacccgctgggtaatgttgtccagcgcagacgtggcctcgtcaaacatcagcagcctgggcttcggcgcaatggcgcgggcaatcataatccgctgccgctggccgccggaaatgcctcccccgccctctgtgataagggtctgcatccccattggcatcttgcggatatcctcgtccacacccgccatctttgcggcttcccatgcatctgaaagggtcagccacggagcggagatgacaatgtttgaataaatatcgcctgtgaataagcggctgttttggagcaccgcaccgatgttccggcgtacagagcgcagatccaacatctgtaaatcccggttgtcgtaatagactgcacccgaaaccggcatttcaaaacctaacagcagccgcatcaaagtgctcttgccgcagccggttttcccaacaatggcgatatactggccgggacggatttttaagctgatgtggtcgagaatccatgggctgtcctctgtatagcgaaaagaaacctgggaaagctccacgcttccgctcatacgcgtcagggcttttttgccgcttcccgtttccggtatctctttcataataggggacgccagctcggcaaggggtttcagatttgcaatgcttcctgcagccatcgaaagggataccattgcaccgctcaccagcccgtaggccgatgaaaacgccatatagtccgcggccgttaccctggagcttgcagccacaaaataaagaaccagcgatccgccaagtgtaatcagccctgataaagcaggctggagcttgatgagaagcgggggattgtagagcagggcggcatcctttgcataggcttccgcccatttcgcaaaagcccggcgctcggctcctgccaattttattttttgtattccggaaaaaaggcggaacaccaggccgtttaattccgccgcaatccccagccgctttctggtcacatacgcctgcagcagaatccccgccgtcagacacgcaagctgcaccagcaaaatccccaccgccggggccgcaagcgttggggtcataaccccaagctgaaataggtacaccacggaaaatatgctgcccacggcactggtgaacaccgtatcactcaacagggaacacatcctggagagtgcctcgatccggttttgaagctccccggcattgtggcttttgaagagctgcgcgggtaaattcagcagccttcccattgccgcattttcaacggacaggcgcagcttcccggaaatccgcgccatcgccaatgacctggtaaggctgatcagcgtgacggaaaggagggttcccacggccagcaccgctgcaggcactaagttggcggtgttcccggatggaaccaccgtcccgaagatcagccttgtcaccaatggtgtaaccatgcccaacaggctggcaagcagacccgtcaccgcaaagagcacaatgctccatccgtcgagagactttagggagaaaatgcctaaatctttcaatgtcaacgaccgcagaggaaacggacggcagaagcatatggcctctccggtgagatttcccaccgttttgctgccggcctttaccgtctgtccggttttgtggtcgttccagccgtaaccgccaaagcggcggggaaacagtgccacggcttccccctctgcggtaaacgccagcatgggaccggcggcgtccttccaccaccttcccgtcagctttaccgtcctgcgcagaataccggtgggattcagcataaaattcaggcggtcatcaaagcccgtcatgaaactgggtggttccagcggctttacttcaaaccagtcaaaaatctcctgcaccgcatcctctgccaggtggtaactgacggaagattggacacggccggttactgcggctccaagccgtccgagggagcgtttaattgcttctctgtcattctcctgccttgcatttaattgttcatcaaacagtcccatcgccgcctccttctattcagttgagatcaggcgcgaataggcgccgcctttggcatacagttcctcatgtgtgccgtgctccaccacacagccatcttccaatacgataatttcgtcacagtcacgaatggtggaaagccggtgcgccacgatgacgcaggtgattccccgttcccggatggaatggattacttcaaattccgtgcgggcgtccaatgccgaggttgcttcatccagaatcacgatagtggggtcctgcgccaaaacacgcgcaatttccaagcgctggcactggccgccggagaagtttttcccattttcccggacaatcactccataaccgccctcgcggctcatgatatcctcatgaatctgcgcgtcccgcgcggccataatgatttcaaaatcctcaatggacttgtcccaaatacggatgttctccgtgatactgtcctcaaacaggataacatcctgatccactacggcaagcgatccggtgaataccatccgtggaatttcgctccgcagctttccgtcgtagcggatttctcctccccacggctggtataagccggacatgagctttgccagcgttgacttcccgcagccggacgaaccgaccagtgccactgttccccctgggggaagcgtgagtgaaaagtcccggatcagcggcggcgcaaggcgcgaatagccaaaggtaatgtcacggagttcaagcctgccgcggagtttttcaaaagagggcagtccctttgctgcttctttatggtcttgtccgtccgcttcctttgtttccgtttcagactcttcatcatattccacatcagccggataattcatgacatcctccacccgctccatggaggtacgcatttcctgaaacttctgccccacggtaagcagggcgtcaacaggagacatgaaagcggagagaaatccttgaaatgccagcagcataccgactgtaaaccgccctttcataatgagggccgcgcccagcaggatcaccgtcatgttggccagtccggtcaacagtgtgggcagaatcccaagggtactgcccagttttgcgaaacccacctctgcactgttcacgctggcgttcagtccgctccagcgctcaaaaaaaccattttccgcgccgctggccttgatagtttcaatcatttcaatgcctgaaagggcagtggcggccagcttgccggcatcccgcatctgcgcacgggcaaggttaatgcgcttcccggacacatactgcgtaaccgcaaggttcagtaccgctgtgaataacccaatgacagtgagcagcggcgagtattgcagcatgacaaaaaaataaaagaacagcattgccagattaagagccataggtgccaggtgtgcaatcaacgtttccgcaatgccctcattgctctgctgacgctgcgcaatgtcgccggcatatcgctgggaaaaaaattcgatgggcagcctgagtacatgccacataaatccggagttggcgctgaccgccagctttccccttattttaagaaggcagacggtctgtaacaatgacaccgctgtctggaacagaaacaaagcccctaacgctgccaggaacggggtgagccaggcagcgttctttccggaaagaatttcatccataaagatacgggagaaaaccggagccgccatgcctgccacagcaatgagaaatgtgattgccgccacaaataaaaatgggcccaacgcactatgaagccttgagcggacaaataccaatatgctgcggggccttcctcccggggtgaaggcttctgacttctcaaatgtcagcgcaattccggtaaacgcttcgtcaaattccttcatggagacggttacccggccgcggcccggatcacagagcaccgcctgttcttttttgaagccgcacaggacgacaaagtgattaaagttccaatggacgatgaggggaaaagacatttttttcacgccatccaggctgcagcggtatccctgtgcttttagcccataggtgcgcgccgctttcaggagatttcccgcgttgctcccatcacgtccaacgccgcagtcaagacgcacctgctccaggggcagccatctgccaaaataggcaagtaccatggccaggctggcggccccgcactcggttgcctccatctgcatgaccacaggcacctttgcaatcttacgcattcccgtcacctcccgaaaagcagatcgatgggtctgcgttcatttaaaacaatctgtaccgaacattcggcccccgccggaatgtccttgttttctgcctgaattgaaatcgggcagacccagctgccgggcatctcttctataagccagcgcgccccggcatcggctgccgcctgctccgcctgtaccggctccccaacctcatccaccttaccgaccagggtatcccgggatgttccataagtaatacgcaccttcatccctggggatatggaatagccttctgcggcaggcaggaagcagacagcgccggtttgtgaacatacacccacagccggagcggtggtgggcatactgccgaaaaagcaccatgctcccaccgcaatgaccgcgatgaaaagtgcggccagaatcacccagacggacgggctggtaacctttaaataatcatccagtttgtcgggggaggcaatgcgctccaggctttttttgcgaaaaatggtttcgttcatatgggttttatcggtgttgcattgtatccaccggccgcagcttcggtttgttcatcgttcaggggaattgcagactccacaaaatcctctggcacaaggtcaatacctctctcctgtgccaatgaaacaatctgcataaggtgctgctgttcgagtgcttccagttttccggccagcaccggattagatgccgctttttccataaagcggtttaacgctgcttttgacatttgtatttcctcaccttcttcaagttcattttatcgcacttcacttctggagattttttttaccattggtaagttcgaaacgtaccgccgccacacgctgggcaggccggaggagcaatctgtaaaaattgagaaatttgatttccagtagcatacgtccattttccacacgccatacacttatagccaggtaacggtttgagtccatacattccttgaaatccaccgccagtaatcttggctatttcatcatcggtcaaagcctcggcctcagcctcgaagtcccgcgcagtcagttcaaaaccaatttcctttgccagtgcaataatcgcttttttatgttcttctttcaattcggaaagcctctgacccaatacagaatccacggaagcctgctcgtaaaatttcataagattttcctttgacatgtacatcctccttttatgcggcattcgtctatatgaaaatttgggaataggatctccaaccaccggatacagcttcaagctcgtcatctcccatggggcttacggactctgcagaatcttccggtgtcagttcgaacccgtattccttagcgagtgtgacaagctgtgcgaaatactgctcttgcagtgccgccagcttttcagccaacgtttgatcggctgccgctttctctaaaaatctgtttacattttctttcattatacaaactcctccttatcccttgagcctctcttgtgtaaaatgacatctcttgtaggattccgggtctactatcttcagcagacttggatctagcaaacactgagtaaagattccactgcctccgactgccgccctgacttgttcatcacataagggttgtatatcttgaacagttttggaatcccccagcaaatcttccagcgttacattgaaccctgcctcgttggccagtctggcaatctcaccgaaatccagatgttgcagcgcttccgccatttttccagccaattccggggttgccgcgacctctttcaaaagtctttgcatctcttttgtcgtctcactcattgtcatcaatcctccttttgatctttctatcatgtccatgcctagtgctatttgatgctatcaagggaatattggaccccaagggttccagccgccggatacattttccatatcgtcatcattcaacggcttcatcgcctcttcacagtcttcctgtgtgatttgaaatccagtttccctagccaacgtgacaaacttttcttcatattctttctgcgctgcatcaagcttctcagccaatgcgggcgttgcggcggccttctctaaaaaacgtttcatattttcttttgacacagtaatctgtcctcctccatgagggccgtccccagtcacccagacagcaccgcagaaaggcgggcctgcctgattgtgaaagaagcagccttttgtgtttccctgcagaaccagcgggaacttaccaaactgataccctgtcatcaggggcaaggtacatattatctcccggctgaatgctgtaggtttcataaaatttatcaaactgctgtaatgttacgttggtacgcagataattaagaggatgggaatcctggttcaggctatcatactccctctcatggttggaaagctctctccagattgttgcatactgtctgaacagggcatcataatcaaacccctctgtatcctctgccagggtaaggatactcttcatccctgccatgtctgcaatggcctctccctggacatttttaccgtgaaccttctgccccccaaatgcagtaatggtatcatagtaggcaatgagcttctctgcccgtgccttaaatgctgccatgtcctcatcggtccaccagttagaaaggctgccatccttgtcaaactgggcaccggtcgggtcaaatgcatgggaaatttcatgcccgatgaaaatgccggttcctccgtaaagctgttcccgcgtcatatcctccctgtaaaattcacctcctaaaattcccagaagaatgttgatggaattgtcctggggattgtagtaggcgttggtttccagggtatctacggtccattcatcccggtctaccttctggttggtccgcttccagtccctttcccggttaaaatcagaaattgccttctggcattccacataagaaagcccatccaggtgaagaccgctgtaatcataccatttatcagggtaaacagcgttgattttaatgttttcaagcttctcaagtgccttttcctttgtctcctgcgacatccactcctgttcttttaacatttccctgtagaccgcaatgatgtccttgcacagcctggtaatatcctgctttttctttgacgcatcatatttcttaagaaatgtctgctcgagcggctctgtcagcgtggactgtacagcctcaaaggcatattcttcatcctctaagcggccttctgcgcctgactggatcttatcacacacaagatttaggtcaaatgcttcctggtccagggaatctgccatggcggccacccaccccgccagcatatatgacttgatgttctccaggttctcctctgtgtacagctcatccagcttttttaaatagtccggctgttccaccaggaacttcttaccttccttgtagcccgatgcttctgtcagcttaccgaggggaaattgagagcaaagggactccagttcttccaacgtataggtatggttgattttctggtaaacatcagggtccatgctgtcttcagacgtaagcgacacgcctgccagctgcgcctcaaaatcaatcacccggtcaaaaaggctctccccctccgcctgtgtatatccggccctctggagcattccgctgaccagcttcttattactttcataacggcgggagccatactctgtacggttcttatattccgcagcatctcccaggaaaaagccatccgtccatactcctacaacataggaagaggcatcctccagatccggagtattttcaaagtctacaaatgttgctatctcccagttcttttcggtatcgcagataaaatccgtcagttcttccattgtgctgattgattggatttcctttactgcagccatcattggctccactccgagttcattcctctcgtcccagttcagccatgtttcataaaggcccctggaaagggctgcctcatgtccgtctatgctcttatcctccaacgctgcacgggccttatccttgatatccagcgctacatcaagaaatggcgcagtgtgtgaatatccctccggtatatctgtacgtgaaagccagtcatggttgacataaagatggaagtcctccttcagcgagagcttcatatcctccgttatattggcctttaaatccgaatcaatccaggggcttccgtcccctgtatcctgctgtgcgtccttttcctcctctgcctgggtttcctctggctttgacacggccgcagttttctctgccgctgtcgctgcaagtgtctcctgggtcttggctgtaccgcagccggcagtacctgccatagcagctgccagtacaatggccaatatttttttcctcattccagcctccattctgccagttttaattttataacgctgcatccaccttcttctcatgcaatactcgtggatattacctgccggatccattacagctgactggttggatgatttctgctcttcatctggttaaaatcgtagaaaagcgcagcattcgtctccttccctgccttctcacgaaatacgtgggcaatccgccctgtaatcgtgtccatatcctttctccccgcgcccaatgtcatgataaggaaccggctgctgctggtaaaaatggtaggttaagagaaatgtgtaatattcacgccccccccccaagaccccgaaaaattttcggactccgtttcttccaaatgccggacgatactctccatatccgacccgaaaaaagaatatcgcttttccgtttctgcctctgaaacatcgaacttcatagaagcatcatagaagctcaacgtacctttatcgtttcgtttaccacttcgcatagcacagtcggcacgataataaatgctttcaaatgtgtcttttctctgtacaaaatccgcacctgcggtaatgcttaggtttctgcataccccaaggtttcttccgctctgttggaatctccgcttcaggcattccactttgtctgagattaattcctttgcagaggcctttgtgataaatacagcaaattcatctccgcccatacggctaaggatgtcttttttgaagaaaataccggtcataagctttccaagcgcctgaagagtctgatcccctgccagatgcccatacttctcatttatgagtttaaattcatccacatctatcatgatgaacactcctgaacgattgtctttcgttcatattggcgctccttgccagcagacatgtatgttacttacacccatgaggggtgcaataatgtccccatggactggggctaaatccaccggatacgctttccatagaatcatcactcagcgatactgcttcgtccaaaaaatcttccatggtcagcaaaactcccgcctcctcggctaacaacattacttctctgatataatgctgccttgctatatctaatctggctgccatctggggatcgtcttcggcttttttcaagaagttacttatgtttttttttcattaatgtttcctcctctttacaatcataattttgacgctattgtgttatacgaaagaaacttgaatttctcccgtttaaaataattttaaaaaataaagagccgccttattcaatcaccgtaggagattcggaaagcccgattatgtttccatcttttaattccacgttgattacccagtttgtttttcccgttttcccgggagtgaacacaatatctccatccgatgtcagttcctttgcggaacagctataatctgcgtcaccttctggctcttgaacatatatgcgcttcacgtcatcggagaacttaaaatgataagtaacaggctctccaaccttaataacaggctcatttcccaatttgggggtgacagtaagcttcatatcaatgcagtagaatgtccattgttcctttgtaatttctccgagtttcaaccctccatcctctgcgaaggctcctgcactgatatccacgctgtattttttttccgcttcaaaatcctttgcaggaaaaatgtgaaagaacgttccttcttccgcttttaaattataataattcctttgatagtccggaaccggctcggagcgcatctttgtggtatcatccgttgcgatagtctcataaactgaaccatcctcgttataaattgtcaaggttcccggcatctgctgcacattgctccgtttgaatacaatctccatggtattgggtccttcaacaatcggaacaccgttgggaccgagaaaaacaggtcccagttcatcctgcggcaaaggctcgttgcagtccctggcaaaagcataatcccagcaataaatattggaatagcaaaagctgtagccgccgtttgtcaaggtcaggacaccgccgtccggcgaagtgaagtacacgccatccaggtctaaattcctgcataaggtttccgacacgctgtttaacacagtcaggacataatcctagctgtcaaaaacatggtagctgtctttctgctgctctggcggagcattgtagatggcgctatccgcagcaagtgcaatttttaacgtgtcttgtaattctccggctgccggagtctgggcaagggtaaggttccatccggtttctttcgcaattgccgcaatcagttcttccgctgtggcggcatcctgaacggaaacctctcgcaaatgatccggttcgcctatgtacaggacagccgcttcgtttttatccaaagcagccctttccgtttccagagaagcggttgaacctggcggtttggtctctgccttattcagagacggtgcgtttccattgcacccagcaagcatcgccgctaatattgagctgatcagtaagcccataatcattttttgattgcgcattgattttccttctttcacgttttattcctgtttaggatggtgtattatgttatacgaaagaacacgtaattctcccacacaaatttttattcttcgatatattttcgtaactttgccttggcacgctgtaaaatggttgccagtgtactttcattgatgccagactgcattgatatgtcgtgatagttttcccccaaaaaatatttgtggtaaacgaacagcctgtcccgttctgaaagctgcgtaagagccatatagagtgcttttcgcgccggatttgaaattttatcatattgttcttcgaacgaaacagaaagagcagtgtcagtcttgattgtctcgtggtctatggacaactctggtttctgtgtacgataaaaatcaatcagtgtattttgagcaatcgtccataaccaagtgctgatttgtgctttatccgggttataatcggatatatgttcagcagctttcagaaaggtgcaactggtcaaatcctcagcattttctctgtgtaaaagctgataaaagaaatagttatatatcttggaaaaatgttcttgatagagcttctccagatcaatgtcgcttgacggcatactcgcacactcccttctggttaagccatgcatccacttaatccccgagttagactggaaaacatcgttcgataaaagttggagcggctcactttgcattttaatttaccatcccccattctttgattcaatatatttggacggataactcatttggtggaatatatgacggataattggcgttataaggagctgactgacgtatctgtttcagcagtctgaaccctatattcatttacgcttttctaatccgttacactgagtagttcaagggggctgcaaagctgatccacctgctatctgcctatctgcaccatgtaaaaaggggccgttttcccttcactgcccgacctcctccccgatagtttcacactgatttttaaaacaaataataccgtggaattgtacaactgcctatggcaatccatgtaacagatgtgaatgatttgattttaatatgccggctgtacgattggccatgcggcctatgtcgaataaaccggttaaaaaattccataaaaagaaaaggtacattgtagtaacattacaaaccgaagttactacaatgtgctttttacttatcagatacaggggtatcctattcattcaaatatggctggacacctgacagcagccatcccagccgttcatcatattggtaggtcgccaggatttccctcctcccgcttgtgctctgcccctttatgccaaaacttgcccggtatgagattcgctgcaccatatacatcacactgcggtcataatcacataattcaaaatcaccaagagagatttctgtgcagccaccagtgtttttcctatgcatattcctcacagtttcatagtaaaagaactcttccattccactgacaggcagcagagccacctgctgctttcgacggctccgagccgtcatggttcatgcgtctgccttccctgcatacaggaactccatctttgccaatggtaaagtcgtttttgtaagtcagcttgattccgcgtttttcattcaggtcaataaaaggagtgatatgcgcacgcctgcagtattcataatagggcattgcgtcatgggcagaatcaaggagcagttttgtgacgttaaagtcaggaagaaagcatttcatcctgaaaaagcaatgcaggaacccatgggaatcatgggtagaagcaggtgagagcagcgggaaaacaggcagatcactttcagaatcggaagcgacgagcatgtataggtcatagccgtgataccaggaatctctggaggagtcccggccagggcaaggttctcaggagtaatgagccccttggagatggactggtcaaggaattcgttcttatataactgaaagagggagccatagggctgttcctcaatgcggaatgcggtgttttcaagttttggcagaagctgttcgacagagaccttctctacaggagcagccttggaccccttaatttttggttttttggccttgtcttttgtcggatggatatgtggggagagattgtcggaatcagagtaccataagcggtttaggaagtcataaaaagtaccgacgcccggggtatccccaaactcaaagccactcaggatggcataaaggggattgattttaagctgtgcagcccaatcagtgagggaggtaaccttgaaatcaatcgagagcaggaaggaacgctgcatacaggaaggagttcttggcttagggccgaagacagagtatttgtcccacatgaattcatccgtaaaggaagggtcaagattccaaaaccgatcaatgatatcccaggtagaatgggaaaaaaagtcaggaacaggataatatttacgaagctgatcaagaagaaagtcttgataggcggaatggccgccagagttaacaggtaacataaaaatcgcctcccatcgaaaaatgtacgtttgatcaagggagcgaagcaccgcatttttcgatggatatgtcaagtattttggcaaaaaaggagtgtgtgaagaaatctctgtaaaagcagctcttctatgataatggcagggctgaaagcttctctatgagcgttcagcccttggtttatatataccgcacaatactgcatatgtcaagaccaggtggattcccgcctggtttgaacggtcctggattctcttacatcggcagtcggccctcatacatgaggctcagttccccatatacctggccccagttccggattggcatcgtccacttctttgttgcttcaaatgttgacaagtacagagcctttaaaagggctgtatcgcttggaaacacgctcctctgacgattcagcttccggtatgtggcgttcaggctttcgattgcgttcgtggtatatataaccttgcgtacagtcgttgaaaacttaaagatggggacgatcgcgtcccagttctggtgccagcttttcatggaattcgggtacttttctgaccatttttttgtgccccgctccaaggcttctaatgccttctcttctgttggcgcctggtaaatcgttttgagatctgccgcaaagagcttacggtccttgtctgatacgtattttaacgtattccgcacctgatggacaatgcacctctggtattccgtctttggaaaggcagcggctatcgcttcctttatccctgtcagtccatcggcacagagaagcaggatgtcttttactccacggttttttaaaccgttcagaacggaaagccagtacttggcactctcattttcgccaacctcgatggtcagaacctcttttaaaccatctgaattaatccccagtacaacataggccgccagcttacggatcacgccgttatcccgtacagaataatggattgcatcgatataaagcaccggatagacatcggaaagggggcggttctgccagtcttcaatctggggcagaagcttatccgtcacatccgaaatgaagccttcggaggcctcgaagccgtagatatcctccagtgtttccgagatctgccgtgttgtcatccctttagcgtacatggatatgatcttctgatcgatatcagagatatctttctggcgtttctttaccacctgtggttcaaaggtggagttacggtcctgtgggacttcgactttcatgcttccatagctgctattcacctgtttggttttatagccattgcgatagtcatcgcaatcggaacgttctgacttgcgatagccaagatgctcgtccatctcggattccatcatctctttgatggtaccgcctagtagatctttgagggcatcctgaatgtcctgggcagattcaatctcatactcctcaagaagctgccggatgatgtttcgctttccatccgtcatttgcactttgtgtacagatttcttttctcttgccataataaaaaggcctcctatgatttttattttatcatagaagaccttataaatctttaattacagaaaaactttcacagactccaaaaaagtggggaattttaataaaaatggagtctgaaagccttaattttactggcttagagattccgagagactattttatgaaagggaggtacaacctcatgatttacgtaggcattgataaagcgacagccccatttttcagggctgtacttgtccactacaagaccaaatataattccagtcaatcgctttatcaatgctcctcagaagatggtcttgggggaccatgtcatccatacagaacatttaaatctgctctcttttcttattcgtattctaagtcatcatagaaatatcccgccttcctttattacttcccatgagaaagagccataaaatcccaataaaggaaccgtattgctcttttaaagataaataaacctccatactgagtacttttaccttacatcagtttaggaggatattacaggcgcatgcactctcccactttcactctgattcatatccatattgaacctcaatgtcttttacacgtttaagcagactcctaatttctttacaagccaaaaaccctggaagaatccatcttccagggccaaggcatctatttcacacgccctgaaaaacacccatttccaggccgcaaattcactcaatttttcctcaaaaactgctacatcttgtggtttcatccgtcatttctctccaaaaccacaatttggcatctaaactaccgtagcttaatgtggtgctgcggcggaatagatgcctgcatctacattattttattgatacattggaatactatctatcccttaactatccactcacctgaacggttatttccacttctgacaatatatcccttatcctgcaattctgcaatcatcctttttacagtgcgcaatgaaactcctaactccttttgtaattccttttgtgtgacttttgcattctgcttcataatggtcaacactctttcttcaggagacgttaccttaattccattaatggtgccaatggtgtcagaattagtgccaatggtgccacaattagtgccaatggtgccagcttggcttaataacggctgcctgtacatatttatacggaaatctccgtcaaaatcgatcagctctggttctggaataccatattcctggcattcgcgtattattcgaggaataccgctgccccatttttcaatgattttcatataagagaatgcgttggctattgcacgattcctgattttagagtatccttccttcattttttcaatcgtcacaccattcattagcatacctggagaagtaatctccaatcggttatcataaagcgctacctggatattgcccgggtccaaataactgcgatgggctacagcattggcaatcaactcacggatgctgtctatcggaagctcataaacatcctgcctgtaaataccatctatcttcattccccggttaattttctccagcacatattggtatgcggcctccatctgttcctgaattggaccgttaaattcccgcctgtctacaaagtacgcacggtcattacctttaaagatagcacactggatgttttgctgcatggtattcttccctgtcagcaaagcatatgcattcgtcggtacaatttctccatctttttcccataaaatcccccaggataacagtacattctctgttacatctttaatctcagctttggctgcattggtcaatgcatgttcgagggcgactttttttaaatcgtcacatagttttttaatgtcgtcttttgtaactgtcaagccatcacacggctcactgtcataatagcggttctgtccttccagtatcaattcctttaacataaaatcaggtgcaagacgggtcgttcctgcaacccggataaatgttccgtctactattccctttgattttaagtaatacgggcgcattttaccagaactgatttctacaacaataacggtcttatctccaactgtctgtaacgtcacgtccgggataatcctcggctcacaactatctgatatagcattggtgatagagtctattgtctggaaaattgtatccggattcatgcctgttacatctaatgttgaatcatcaataccaaatacaatccttccgccacgtccattggcaaaggcaactaccgttttcatatacttttcactttttcccggtacatctactttatattcgatgctctttgattcacctaaaaacaatttgtctaatgccatattctcccctccttaatctctctttcggtgcacgcatcctgattttattttagataatagcacattttctacatgaatactattttccccttaaaactttactatattatataaaggaaatattataatatcaatagctacagaagcttcgttctcgatatatgaacagactacatagccgtaatgtccatactgtctgcttatgaataaaggttctatactgaatgttggggtgtgctgaaaagaacacttccaacattcttttcgttgtaataaaatacatctataagaagcctcctaaacgcattatcccgaccaaagtttaatgttacggaggtgaccccttatagatgtaccctaattataccaaggctttccttaacttggaaggtgtttttattaaaaaagtggttcaggcagactctttcattaaaattttcatccagtcccaaccggtagaacagacttgtccctgctgtggggctaaaactaaacggattcatgattaccgtttacaagaagtccaggacattcccttactgggaaaacaagtaatcctgctccttcgcaaacgccgctacctctgcccatattgccgcaaacggttcacggaaccctattcgttcctccccagctaccaccgcaggacccgcagactggcattttacattgtctccctgctccggcagaccttttccttaaaacagatcgcagagcttaccggtgtttccgtccagacggtttgccgccttctggacacgatttgctatcctccgcctggccagcttccacaagcgctttccattgacgaattcaaaggcaatgcttctaccggtaaatatcagtgctttctggttgatccgaaaaagcgccggatcctcgacattctcccggatcggacccagagccatctggctgattattggcggaacattcccaggaaagaacgcctgaaggtaaagttcttcgtctgcgatatgtggcgcccctacaccgaacttgcacagaccttctttccaaacgctacaatcatcgtggataaatatcatttcatccggcaggtgacatgggcgattgaaaatgtacgcaaacggctgcagcgctccatgccggtttctctgcgtaagtattataaacgcagccggaaactcattctgacccgctataaaaagctgaaggatgagaacaaacaggcctgtgatttaatgcttcactatagcgaggatctgcgtctggcacaccgcatgaaagagtggttttatgatatctgccagatggaagcgtatcgtcagcagcagagggaatttgatgactggattgcgaatgcacagagctgtgggattaaggaatttgaggcctgtgctaagacctacagggcctggcgaaaagaaatcctgaatgcctttaaatacggattgacaaatggtcccacagaaggatttaacaacaagataaaggtgttaaaacggagcagctacggaatccggaatttcaaacggttccgaacccggatacttcactgtacatcataggataaaaaggtcggtaatgcggaggcttatttggtatgcccaaaatcagtaaaacctggaactaaacataaaaagggcccttttcatagaattggggcgggattttaacaaatcccaccccaactattgacaaagagcctgaataaaaagcctgacataccaggcgctcaatgctctgggtatgtcaggctttgcttcgattcgcttcttgtagtgtggccttttctgccgtggtttcaaaatatattgttgctataggtttatgctttagatattccgcaccttaaaatctttccatttcgacgcaacgtgaagttctgccccactgtctatcgctttgaagtgttccttaccgcagtatattttcaaatcctcacgtcctcgcaaatcaagctcatttgtttttccttttgtttcaagaatgaaatacaattttttcataccctcaagttcaacatacaccgcccaatcggggttgtatgtacctatcggcgtatcaactttgaaacggctcggcagtttgaaaaacatctttacgtcagggtcatcgtcaagatcgagggcaaaaggcttttcaatcgttgtgctgtcatagacaatataatcatatacgctatgttccacggcaacggcatttcggtcaaggttggcgataagctctgcactatcaaaaatctcctgcacatagtattccgcgccatacaactttttatagctgataccatcgattgcaagggtccggcgcacatctaaaataatctgcgttgtattctcaataaacatctgtgggttgttgaggaaatctccaagccgcccgctttgttttagtatctccgcaacggtagcgcgttttattaatgtctgactgcctacaatcgtgagaatatttggaagcgataaatagctatctgaaagtgttgctgttttaatgccgcgctcggtataggtaacacccggattgtcaatttgaatatcagcggtctgcgtgataatccgcgccttgggtatcggctccatgtccctcaatcccttgacgcttctacgtatcaattcatcctcgtctatctgcactcgataggtagttttctgtttaattttattccataactccaaaaactccggcgaagcggttacttccttctttaaatgcacagtaacgtcccgcgaagcatcgcggataggtggttttgtatcaatgcggcgtaccatattttcaatctgcacccttgcgccctccaaatgcggcggcaaatcaagcgtaccagtttgtatcgcggctttcatgctgtctttgattctgccggatttcgtgacataaccattttgcttaaaatgggccataagctgctgcgcatcgtcgtaggtcaaggcgctttggacaacaacggtcttttgcacggtaagctgcgtaaccgttgcgggagtaatatcaccctcgcgggcaataagttccacagcttttgtctttgctgcttcaagctcctgcggcaacttcgtaacctcaggcattggctcgtctgtttttataaaaccctcacccgcaaggtgagataggagcattgcagtctgctgctcggtaagcggcatttcctcggtcttggtttcctcaaataccatgccgctgaataggtcaagctgcaaaatgccaaatttaacacccgtttcttcctcaatctctttttgcaacgtgttggcgaactccgcaaaattctcgttcgccataacgtgcaacaggttgatattcctgtcctcgatgcgctccccgtcttggttgacgcataggcgcaaaccgcgccccaccttttgcctcgcggtcaaggtgcttttttgctcaatcagcgtacagacttgaaacacattcggattgtcccaaccctcttttaaggcggagtgtgagaagataaagcgcaagggacagtcaaaggacaacaaccattccttgtctttcataatcgtgttgtaggtgtttgtatcgtcctgcgtgtcgcccttggtgttcttataattgccttttttgtcctgcgaaaagtacccgtcatggacgcggctcgcgtctatggtaaagtgttcacgcaaaggcgcgtacttcggcagtcccatcagttcggcatagagttcttcaaacatttgcgcataaatgcctttgccgccctccgggttgcggtatttctttacttcatcaataaagaacagggacaacactttgatacctttttcagtatagcgcaattccttatccaaatgcgcctcaatcgtccgtcgtatctgcatacgtttaataagtttttcgtctacgtcgcctatggcgtgtcccaaccgcacaacatcggtattggacaattcgatttgttccatttccggcgtacagtcgataccggaaacaacatagttttcatataagctgcggtagccggacagtttatgcaaatccgcgcccggtttgacggtgacggctttgcggctcactttcccgtcttttccctggacgtcgatttcaagccgcgccttaaatccgtcttcattggaaacggacagcagtttgatatacggcttgttaaagccgcccgccgcctggttgctcgatacgcatatctgcttgacaagccccatttggtaagcgtcaacaggggttaagcggtagagtagattaactttctcccggtgagtcgcagaatagcggaaaatgcaaaggggcgcaagggacgcgatagcggcttttgccttttgggtgttgtccacactctgcggctcgtcaatgataacgatagggcgagtagcttgtatgtagttgatggccgcgtcgccgttcagcttgtcctgctgctgatttatcacgttttcggccttgcgaaaagcgtcaatattgataatcataatttctatatttgcgctcgtcgcaaactgccgcacatcggagagcttcgcgctgttgtagatgaaatagcggcaagatgcattatcgtacaaagccgaaaaatgctcctgtgttacttgcaatgatttatagactccctcacggatagccacgctcggcacgacgatgataaactttgtaaagccgtacagatggtttaattcatagatggttttggtataaacataggtcttacccgtcccggtttccatttcaacggagaactgccgcccttgtaaatcgaaagtctggggcaatacgttttttcgctgtacttcccgcatattctctatgatttttccgtcatttaacaaaagggtatttgcaacaccaagattggcgaaaagctccatttgcccaccgctttgctccatgctgaaagtggatgtctcccgctgctgtccgtcaaagagggcacaaacggcgtttactgcgtcggtttgaaagccttgcagtttgaattttaatttcacttctcacgtccctccttatgcctatttggaacgatacattttacagtttcagcttttcccgaaacctttaactcatttgttagatgatttccattccgtcttatttgatatatttcttcaatccattccttaaaataatctatcaaatgcaactcaatattgttacattgtctttgaaactcaacgacatcttgttctgtaaagatacttatggactcatcaataccataggtattgccataaatcggatatttacgtcgttccgttaagatgaacttttgtaacaattgaataaatgcgtcaagccccgaaacataatactctaattgaatatctcccttttcaatatcaaaagcaatgtctttcggatgtgtagaaatatcttttgctatgctcttattacgcattagagtttgtggtttccaaatatatttttttctatataacttctttttcaagtagcaaaaagtagcaataacaccgacaatgagggttatcccaattccgctaaatatccattctttattgtttgtaatccattctatcatctaattgtcctcacactatcttcaattcaatgcccttattttcaagcagatagtgggcgtttgacatagcggaattatccgcaagagaattatccgcaacaacaattttctgtggggcaaacgccgccatttgttcaatatgttcggcagtaatgccatcctgcaagcagatgagcatttcgccgttatccaccttgtaaacggtcaacccgtccacatccaatgcggcaaggtcggcggtcaaggaatagcccattttcaagaggatttcataaattaaatcctcgtcgctgcggtcaggcttcaatccgtcgatatgcttgtcgatacggttaaagagcgtcgcaacgtcgccgtcctcaatgggagtatcctcccataacttcaggttggaagtgtctaatttgaaaaccttaaagcccacgtcaatagatggcttgtccccgtcaagggaggtttgcccgccgtcggcctccaaaactttctttccgatgcggcgtattctctctttaccaatctcacagatgtttgtatatccggctttgtacgcttcgcttttatcatcgcacacctcaggaagctgtaccatgatgaagcggcggttgcctccgtccttggcattgagctgcatgatggcatgggcggttgttgcactaccgctaaagaaatcaagtattaaatcatttgacttttcttttaacactctttgcattaaatatataatcaagtccactggttttgaataatcaaaaacttttccgtcaaataaattttgcaataactttgatgcttgcgtacttgaaaatttatcaattacgctcatagggcgttgtgttctttttattatgtttccctcattatcgcagttaagatattgttttgtatagacagtccatatatcatttgggtctttctttatttcaacaaacccattgctttgaccccatttgaatttatcttgcgaccaacgccaacaagccttttttccattattgttgtccgcaggcattatttccgttccgtctggtgctgttataggataatctaaacttgttgaatattgaatagaacccataccaagtttttgcagataatatttccctctgatttcttcgtattcatcactacttttatatctttcttcgttgcttataacaacgccgttgacttcaatcaactctaagtttttgcaataacataggatatgttcgtgtttaatcctaaacaatttactatcggagctaccgccgccctctttatttgtccatatcaaatcgacaacaaaattttcttctccaaaagtttcatcacaaagtttgcgtaaatttgttatttcactatcgtttatgcttataaagataacaccgtcgtcccgcaagagattagcggcaagacgcaagcgagggtacatcatattcagccaatttgtatgataccgccccatagtttcagggttgctcttggtggtctgctgcgtaacctccatataccgccgcatggggtcggcaaaatcatcctcgtacacaaaatcgttgcccgtattatacggagggtctatgtaaatcatcttcactccgcagaagtaggatttttgaagcagcttcaacacctctaaattatcaccctcaatatagagattttgcgttgtatcaaaattgacgctttcctccgggcaggggcgcaaggtggccgtactgcgccgctgcgctaaccgcaagcaatcgctcttgcctttccacttaaactcgtatttctcaaaatcgtctgtgatatattcgccacaaagggaaagcagtttgtcaatatctaatctaccctcgatgaagcactccgggaatacggatttcagtttgtttttattttcggcttctatatccattgaaagcccgtctaatttatcaatcattgggtgcatcctcctcgataaaacttttcagcttgtataaacttatttctgcaaaatattttaatctctctttatcctgtacttgtcctgaagcagtctctattgccgaaatcaattcgcctaagatgttatttgccgccccagccaaattataaggaacatagctgatttgctgaatataattttttgcttccgctttattgtaagctgacaacgcacatttaaccaattcttcaattttatcataatctttctgagagattttgtacctcattataccactcctcttttccatcttttcttttatatccaacctattttctggtagtaactctaccatccttagtttttttcgtatcgacaggcataacccatgacgttcctattttagttgcatctattatcttcccttgacggcacaactctgaaacgcgccgtgtggtaataccccatagttcacttgtctattttacggtcataatatccatagtattacgtcattttgcattatacgatattgtcggaataatatcaacattaaaaaaccaccttgcagattaataggcatctacaaggcgggcgacgttttaggcctaaaccaactcattcaatataattttgtctgctaccttctgtgcttgctatgaaatagcaattcattccatcgcatcttcttccggcataggatgctgttttagataatcggctcgaatatgctcagaaagttcatacgcatgcatatccaccgtgacacaattgctctgccagctttcctgtaaaaagtaattcccggtatatttccttcttaaatctgtgaagatatttcaagcgcagttgtctatattttccaagattctttaataactcactgccttcaatttcaatttactctaagtccatgatagccataagcggcctccttgatagaatgatttacaattcaccagtttcgtttgtgtgccttgacgtacttgtttctcgtaaacatccttatcaaagagaccgcttagctttttcctattaatcagatataaatataccatacaggcgccccactctgccagggcagtacatattctgggaataacctgattgtaaagcatgagctatccctcattcatgtattgtatcaacagttccataagctctttcttcttattccggctgacgggaatccgttcaccacagatgatacagtcattaccggatattccatccacatgcttcatattaatcagatctccttttccacaacgaaaatgccatacccacccatagaatcttccaattcttttaatgtgatcctggacagaaactcacctctggccgtccggtaacatgtatcatgcccctggctttcaatatagtaaatatccgaaactgccagcttctgcagaccgtccttcgtaggaaccgatatagatgtctgcactgcctttttcatccggccattttcttaaaaagttcctgacatcatggtatgcattacgccagtccccttctgtatagtatattttcaatgcgtttgtatccaggtcaaaatttatccctttcttttgcccgctattcatatactaattcctcataaaccctgtaagcaggttttcttttgctgaaccattataccatatacactcctttatattctcagcaagctctgatgtttgcttcagtgcaaaaattgccgcccaaaaacgtccgtaatcctcctccctccctttatcttcatagactcggaccaacgctctgtccacgcagtttaaatcctcagactcaaagatttcgtccactttagcataaagctgttccagaatatcctgttccagcctatccgtatcaaagctcaacttaactttgaacatctttatgtcctcccttcctgatactgtccattccatttatcatttacgaaaaccttattatttttaattcttctttatagcctactgttgttcctatattttatcattccgggtacccattagcaatattagcctccagggcctgtcaaacgatttccattttgataacaatattactcttctaacccccctcttgtttacagattcacatccaacatcatacctgtccttagctggatttgaaatttgtttttcgatatcacacgtatctcccggacgatctgccgtatgaagatattatcaaattcggctcctgaggccccgtctgtctcacctatgattcggctgatttcctggtccagatactcatactcgtcccttattttttcctgctctcgtatgctttccctcctcctttttaattcgcttatctgtaatcccagctttcgcattcggtcgctgtaccagttctctccaccatgttccctggctgccatgcccacatagtccataagctggtcacgcagttcctctatggttttatcaatctcttcctctgtgcacgctcctccaacaaccttggcagcccggaggatatcttcctttaccccgtttaagaagttttcttcctcctggtcaattgacaggctgtgcagctttcccatgattgcttcctgaatgacttcctcctttaacgtaggtgattcatggcaccgcttcgtcccatgctccagacggttgatgcagcgccatacgattaccttcttcccactttttgcccaggttgtcctgcgataatgggctccgcattcattgcacaccatgattccggtcagtgcatatttagaactatatacgccctgggccgtcttccttttcctggttccggctttttttaacgaggagcgtcgggcaatctcctcctgtatcttgtaatagactgtcttcgggatgattgcctcatgatgattcttcacataatactgcttctgctggcccgagttcttcaccctccgtttggtcaggtagtctgccgtgaacgtcttttgtaacagcacatctcccatgattttttcattggtcagtatgttgtagatggtacccgtactccatgttttcttaccggtagtggtttctatccctgcgtcctccagtctgtgcttgattcgttccaggctgtccccgtccagaaaccaccgggccatgtttcggataacagccgcttcctcctccacgatgcacatctctccggttggcgccttcctgaatccatagcttctctgtcttgtggattcccccttttcaaactttctcgcatacccccacttgacgttggtgctgatggcacggctctcctcctgtgcctggctgctcaagatggtcagtatcatttcggttgagtcatccagggtgttgaggttttccttctcgaagtacacggccacgttcttttccttgagcttcctcacccaggagatgcagtccaccgtattcctggcaaaccggctgatggatttcgtaatgaccatgtccaccttccccttcagacactggtccatcagctgattaaaatcatccctacggaaggtattggtcgcgctgcgtccatcatctgcgaagacaccggcgaatatccagttgggattctgcatgatgtgcctggtataatattcaatctgtatgtcgtaactggactgctgctgttccagctccgtgctgacgcggcagtatgccgctacccgcagcttccgaatttcccgggatgactcatctgtcgggttccaggttgccggaatgacctctacgattcgttccgcccttggcatgtaattcctcctttccatctgccgccttagtccggctctcccgtttcttccggccgttttcttccaatctggtctgtacttgtgtaaacagttcccgtgtcaccagagcgggaaatttcttatccccaaggtaaacagggttggtgagaatatttcggatgcagctgtggctccatgctggctttcctttctggttgggtatggactggcgtattaactcttttgccagtgctgtcagcgacatcccttctgcgtaggattggaataacatctgaacaattggaccgtattgctcatggatgattggcgtttcctgtccatccagccagtatccgaaggggacacagtagcgtatgttcttcaatttcttatcttttgttgttttaatttctgggtattgaagtactgtcgcattgtttatcagctgaaatctcaagcttctgtccggctgtacctctaccctcttgatgattttaaatatggacgaatcaattttttctgcctggatggaaccatccaatccccgaaggtaatcctctatctgacaggtcaagtctgtcatctttatctctcggtatctcctggcagcaatctgaaaatagagttgctctatcctttcatcgtcttcgttgcatctgttccagcacacacttaattccgattccatacgctgtctttctttgatgattccggtcagtatctgtttcgtttcctcatggtacagggtaggctctgttttcatccgcataagagcttgtaagaacattccatccagctgcttctctgtcataattggcatcttacatggttccttcgtgatagggtcgtaatgcctgcatttccaataccgaacgttcctgttgtcacacctgctgctctgcttatagatggcatataccccgccgcagctactgcatatcaaccggcctgtatacatggatgttccctggatggagccggttgaatgacgctggttccataaatcccgggagcgttttaaacactcctgtacccggtcaaactgctcttcttcaatcatccttgggtacggctccactcccagatagtccttgttacgcaatattttccggataagggcgggtgtccaggacggttttccacgggtggtaggtgccttcctgtcttttagcatcccgactatctttttgatggattcccctccatcatatgcatcaaagataaggtgtacagtctcactctgctctggattcattctcatgtctccgtcaaccagacggtacccgtaggtgatatagttgttcatatggcatccctcctgtcataggactggctcatataggttaagtccgcaccgcagatggaagcccagctcccgttcctttcccactgagacttcccggaccaggaggataaactggtcaccatcgaacgcctgcatcttcccatcatatccctggagctgatgcagggtggcctgtaatcctgtgatggtatcctggtggatacctctactgtacagctgtttctcttctgacctgcatctgcttagctctcgttcaatcttccggctctcctcaaaataaagagcagagtcgatacactcatttgcttttaactgcctgagtatatgtctctgctcttttagttccagtttcttttgatttaaggtatccaatgcctcatgaagtccattggtctcctgcatcttcttcatcccccggatgactgggtccaatatctcgtccgcgtactctttcagagtattaaaggcattcacaaacgtgttttttatatccgcttcccaaatctcattggtatagcactggcatgcctctgaccggtggcccggacatctccacttgatggacactcccttttgtctctgctccttcttacggatgaaggctctcccgcattccccgcacaccaccttcccgcttaagatataggctccctcgtttccacatgatttcatcctggcccgatggccaagacggtgctcctttatctgttgtaacctcatctgctcctccctgctcaggataccctcatggtcatcccttataaaatactgtggcttcttcccacggtttttctctgtccggaacggcaccatcccagtcgaataggttttctggtgaaggcagtcacccactgttttctcgttgaacaggatccgcaggaccggaggaccagagcccaccataaggcgccgctacttggttctgattcaggtattcggctatcctcaccccgctcattccgttcatgtacatgctggccatcctacggacccatactgcctcatcctccttgacagccagctcctttgcttcatccttatcgtagccatacggccgtctgcttatcacgaatgtaccatgccggaaccggttcaccgctgaccagtggacgttttgggagatgttctcggactcctgctgtgcaaccgcaccgtatacggtcaggattccttcactctcctccgtcatggtattcaggcgttctttctcgaaatacacacttacccctatttccttcagatggcggaccgtggataaggtgtccactgtgttcctggcaaaccgggtgattgatttggtcagtatgaggtctatccttcctttttcacattcctccagcatccgccggaagtcctccctcccccatcggctggttccgcttattccctcgtccgcatatatcccgcagaattcccaggccggatttttctggataagtcctctataatactccatctgagcatcataggaatgatactggccatcgtcatccgtgctgacacggcagtatgcacacacccgtatgctccgtatctggtgtcctgtacgctctggtatggtctttgggatgcataatacttctgccacttgtcctacctcctttcctccgttttcaacaagacacattaccacacttcctgcaccatatcaagtatcagttctccgaattctcacattttcatacaacatgtcgggagcatatcctctggtacttccgaagggccatgtcatacatgacggggtcaatcagcctttggcgcagcagctcatccagtatcttctgtacttccctgaatcgcaggtattgaagcagctcaattgtttccatagttcctccaggaatactctatttccacctcacggatttcttcatgtgtatcgctcctgaagctgttatgggaatgcccatctgtaacaccttcatccattctggcctcgttccattccacatccatgcagtcatcccggaagaacggctgcatgatctggcatcgaacccaccttctctctgtctcttatttgtgcttctatttgacactactccccgaagcttgtccagaaggatgcctggacagggcagtcagtccgcctgcctgcagcgcacaggcatcataggaattccacctcctccgggttctccggaggccgccctcattgcgtggtccccggccaagggggctgtgactggacggaagtatcattgtcagctgtccggagccatggcgattcaaccctgcttatgattgattgagagtcaggtgtgtaccgctcttgccttaagatgtattgcacatccatggacaggatcatgtcctgcaggcagtcttcgcgcacccctcacgtcgctttcgttcctcacgaccggacagccaatgtaacggattggctggatatgaagttatcaatgtacgacggacggcatactcccgtccttttattcaggcctgtatgaatcattttttcttttgtggattatcatatatccggtctcccacttaagagatgggccggttatactccattctctccttccatttcaggttttcaaaaaataaccctctactatttaaaagccgaaaaataggcctactgataaccaacttacttacaaaaacttgattaacttcccataaattcttctgcagtctttccctttaaaatgcctgcaaaaaatatccccctacttttagaggtaaaaaaagggcctcctgataaccaaactttttcttaaatatatataaacttctctgaaacgcaggtattgaagcagctcttttcttccttcatgcgaatccttcagataacttcgttgggtcaacctcccctgtatttatacattcccctctcatgaatgggcaatttcaatggggatggacttatgtttttctttacaattgcatggacgagccagttcctcatccctgtaccattcccttctaaaaaaacatccccctactactagtggtaaaaaataggccttctgataaccagatttcttcttacgattttcttaagatgcacacgttcggcatacaacccagcttgccaattacatttccagataagattcccccgcgactcatggtaaaaaacagccctttgatagccaagattaattgcaaaaacttttcaaactaccctgaacactcctatcaattttccctttcaaaatacctgccgaaaaatatccctcactattagtccagtttcagaccccttttgataacctcgaaaagccattttcgttaaaagtgcacatacaactttagttatttttactcagtttatcacgcctcaaatgatttatattctttccctctgtactagatattccattgggtacttcttggcgggccaccatgggccagggcatggcccaccggatagacagactccacccttggcgtagcatgtattttttttgtacaggtacagcatgtatttgattttttttcgcctcgtttttcttctccaaacaaccaaaaagccgccacataatatgacggctaccctcaaaacatactatcacatatcccgaatcatcttcatcaatcgtatcccatccttcaccccttcctcatacagatacagctgacacatcccatttccatccagcatgtcatcaatacaatcctctatggcatccctctgctccttggtaatttccttcatccaatggtccatccgttcgttcagcttgtggtctgctttcttttcttcctgtgtcttttctgcctgccatcgggttaccagccattctaccctggctgctatgacttcctcacattgttccctcgtagttttcttcatggacactcctccttccgccaacaccatatcgaatatcccggcggaagtccatatccacatgtcataaagattctgctccaaatacgtcagaaccacctacagggtgcacctataaatacgccattttccttgtacttgcgtggtctccagccaaaaccgaccacctgacaggtgaccaaggctccaaacaggtgcacctttgtggaagcagaaaaacgcccgcattgcgggcgattgtggccgggaggggcgcctttaggtgcacctccctttaacctgcacacaaatcgaacggacggaatccgtctcatctatatttcccaaacgcacgaaggaatatctagcttttcaataaaactatacccctttaaatccgttcaaatttgcttgattttgcaggacatgcccaagtatcctactgtctgttccaaaagcccatacgatggcttacagggcgttacagggtctaattcaaactatcttaatagcgttattgcctaaactttctttttcattaatatctcgttcctaccgctccccgtctcttatatcctcatatttaagcatgggcaggctgtatctccagtaattctttaccagctgcttatccacaacgattagggtgtcaaaaggtcattgacctttgatataaatttgtaccttgaaaatctaacacgatattaaaaatcttcgaatttttggtataatagagttatcaaaattcgaggtgattttatgcattcgtagcaaacaaccagcagcaactgtccttggcggccagcacattatcacttacacaacgtgaaaagatttttccagctatcagcactgtctttcccctcctccttgcatcagctgatttatcttctgttaatataaaagtcatatcaaaagcagccccaacaaatttttttgtaagaagccgtttaatttccgtatacatcactattaatatttggagtcagtcacatccacactcttattatctacacataaacccatatccaaaccacagctgcctattcttttctaagcccctgtaaacaaaattttgtaaagaatctcatccccaacgcaaatggataaacagtatttctcggatgatacttcaacctatgccagacaagcccgccccaaaagataccatgtccttgtcatactcccacatatagttatcgctatctgattccgttgtatttcgtataaaaatactcctattcttcgtttccatcccttccacccagcctatgtgttatacctgtacccttcataccgttctacattctcaggcctttccccaaagagaaggtccaatcctccctgaaagcagctcccaatactcctaacacctcccttatcccatagccagtttcagatagctgtttctattacataacagatattcccaggttccatcttacaattaaacatgtaatcaagactaaactgattaatatcgatatggaattcaccaccccagagcgttcttcgtccaaaccgcattttgccgtattaatgactgtaatagaagataccggagcaaacgcgatgattaccagtacctgtcgtatcattatttcaaagggaagcagataatatatacacagcgagatgattgctgcaagtatataacggaccatcaggtttttaataagctttcccacctgcacatcacttgaatcatttaattccaccttaatggatgcccctatcaccagcatggctagaaaggtgttagcaactcccacatagcccgcggcctgatatactacaacaggcagatgtatatccgcgaaatacaggaccatcatagccacatatacatcaaaaggtaccactttcaccagctttcccaccatattctttaaattccatcttcctctcccctcaagtattccagaggcaatcacatacaccatgccagaacacataatggcattccccgaatcaaaaatgcaggctgccataatacctgtctcacccagaaagttttgcaaatatggcatggcgaaggctcccacgttatatcctgaataattaatgactccaaatgcctgttcctttttatctttgcggtcagctgacatataccctgccagactcatgaaaccattcattccaatggcaatcagtgcaacaaatatcagactcatatcccgcttataatcctgaaagctggtaatcactgctgccggcagggtgacattcatgattagcatcattaaagtacggcagtcttctttttgtaaaagctgccttcttcttaggacaaatcccagaaagataatgaataccagactccctgcttttataattatttcccacattccctattcacctcacccctaataaatactcccatcagttcctcatatataatacggcaggaaacctttaaaggcattccccgccgcattctttacatatccacccagacattctttttatacggaaccttctaacgcccacaaaagattcttagatttcctcctaccttacatctttaactaaaatttcaaacaccctgtcatcgtgtcccggcaatatcatgacatctcccaactccctcaccttagcaaaagaacgggcacagtcatataagctggtattcacgcccgtgggaatatcttcataaaaattttccatggaattaaacaggtcacccgcaatgagacatttccccttctctgtgtccacaagcacgccctgggaaccaggggaatgccctggcagtgtaatcagcctgacacccggcgtaaattccatatccccatccaaaattttaaactggtgataaaagctgaaataaaatggcggattctccttatcatttaattcataacatgccttatgtacagtaaagggagcaattgaatactggagttcttttctctgcacatatacatccgcccacggaaactccttcaccccataggcatgatcccagtgcagatgggtcaagataatttccctgatatcctccatccttaccccttggttctttaaacattcccctatctgctgccccaacgtcctggtcaccgggttatggtatctgctgtcacgctccggatttttggacggacctgcgtccaccaggatcatccgtcctgtctcttgttctttcagtagccatgcaatacatgggatttcagatacttctccgatattggcggcaacaccgcattttgcgatgcgtgccgctttggtgagctgcatggttgcaagcttcaaaggtattattttccacatatatgtccctctttcctcaacttatttcatcattcccggaagccacaggctgaaggccggaatgtacgttaccaggattaaaaccacaatcatagccattaatggcaggatgacggatttcatcatgtccttgatacttgtctttatgattccactggctacaaagagattcactccaactggcggagtaacgaatccaatggccaggttcaggaccatgatgaccccaaaatgaatgggatctacacccagcagtgttactaccggcaataaaattggcgtcaacaccacgattgctgctgctgcctccataaacgtacctgtaatcaggagcatgatattaatcagtaacagaatgataattctgttgtcagatatgctggttatgtactctgccacaatcacaggtattttttgcaatgtcatgatattacataaaatcgctgccattccaatcaggactataaccacggaggatgttacgcagctctctgcgaaacattctgttaattcttttggttttatttccttataaataaacacacctacaatcaatccataaaatgcggccactgcggctgcttccgtaggggtaaaaattcccagatagatgcctcccagcaccaggattggcacaaagagggcccactttgcatcccaaatcaggcttgcaaaccgctttgctgagaaacggcattgttcccctttccagccatgcttgtgtgccagatagacggtaatcaccataagggcagccgcaaccaaaaggccgggtacgatgcctgccataaaaactttaccgattgacgtagatgaggaaatagcgtaaatcacaaagggattgcttggagggataagcacaccgatagccccagcacaggctacgatagccgctgcaaactttttatcatatcctctctctatcatggccggaatcgtcagcccaccgatagcggccaccgtggcaggccctgagccgctcatggcagcaaagacaacacaggttgcaatggtagccagggcaagtccgccggtaaaacggcccagaatctcatccgctaccgaaagcagacgccgtgagagcccacctgctcccatgaggtttccagctactataaagaaggggattgccataatgggtacgctgttcactccgttaaacgctatattggccgtatatcccataggcagaacacccgttccaaggatagtcatcacggatgccaggcctaaactaaatgcaattggcacgcttagaaccaaaaacacgaaaaaatatccgaatatccacaaagccacgggaaactgcatccccaatagcaccggcaggaagacaatggcaaccactacagcagcagcagccaaatcaatgattttgcacttacgcatatgcctaacaaaggattgcgcaaccctcaaaacggtcaagccaaatccgataggcagtatcagatatggaatcatgtatggaatccgcagtcccgctgtataggtcgggtacaccatctgctgggatatcatgccggttccttcataataaaggacagcggcaagaatcgccataagaatatccacaatcaggcggttgactgccttaagccgttccggcagcaaaccgtataccacatcgatttttaccatactgtcattcttaactgctacagggacagccagatagctaatccaaatgaacagaaatcttgccaactcctccacccatgatatggaggcggacacgcccagtttgattaccacataccggtatactacctgtatcgtgagaagcgtaaaggaagcaaacagccctgccgccaggaatgccttttccagatgattgtccaggagacataggatgtcccaaaatgttctgcttttcaattctatcgttctctccatttgacacctcgttctctatccgtcactgctgggttttctgtatcatttccaatgccttcttcttcacatcactgtccatcagcttatcccatgtgggccttgtaatatccataagctgctggcgctcctcatcacttaacaggtagtagtgaacccctttgtccatcataaactgacggtctttcttagaagtctccttttcataatccctctcaaaatccattgcttcctttcctgccctcattatgatttcctgaatatcagccggcagtgaatcataataagccttattcatgaccaccagatgaagggtcaggttatgctctgtgtctatagcattttggatgatttcataagctccgcagtttttcgcataagaatccgtggtggcccagccatttaccgtattctgctcaatggcagtaatggtatccgcccaggctaagggcatagccgatgctcccagagcctccacggtagccatctcagcctgggactccgtggtacgcagcttaattcccttaaaactgtcaatcccattcataggagccttctcattggtgcagaaaatccggtatccaaacatgttgtacatgattggctggaatcctacctgttttaattgttccccgaaaaattctcccagctctccgtcatccaatgatgaattgaaggcatccatcttatcccggctggtgacataagggagttccagagcgtcaaatgccggcacgaatgaaacgaaattagaagaagaacaacaggaagcttccaggaccccttgctgaacctgctctgtcgtatcccggtcactgccaagctgtgctgaatcgtagtgttctatcacaatccgaccgtctgaataagattcagccagctccttgaatttttctattccctcatgcacggcctccccgctataggtagggcttgcaagctttatagtataaacgtcccccgctgctctcgtatcctctcctgcatttgtttccccgctcccactgtcctgaacgtttgtctggaccttttcctgaactggcgcctgtgacgtccccggtgcggtggcacctttacagcctgttaatgccaacatgcctgcaaccccaatgatacccatgatttttactgcatttcctcttgtcataacctttctccttttctattatttcacatttcagaccatatcaaatgcctggaaatcgtggcttggaagcaccacagcatgataccgtcccattttgtccagggaatccagactctcctgcatattgccatagataccgctgggtatcctggtctcccagttctccactgtattaattaagtctccagccatcatgaacttaccttttgcagtgctgaccacaactccctgtgaccctggtgaatgccccggaagagtgattatttccagaccctccctaaactccacatccccatccagcaattcaatctgattataaaaattcagaaaaaatggaatctgggtcttgatattgatttcataatgtttataatcggtgcgcatgggggccacggaataccgcatctctttcacctgcacataaaccttggcattaggcagtttacacactccataggcgtgatcccaatgcaaatgggtgaggataactgtctttatatcctccggttccaccccctgttgacgcagcctatattccaactgctgtttatctgtccgctcaatgggattatgatatttgcttccccacaccggatccggcgccgggcctgcatccaccaatatcagttcctctgtactttcatttttaagcagccatgcaatgcatggggcctttactacttttcccacatcatgagccactccatggcggcagatttgtgacgccagcgtaacactcaatgtccctaaatccaggggcgttatcttccacatatatattcctcctgtcaaacattttttatgatttatagtaaggtccagccaattatattcccgggcctcttcaaggcttgtagaacggactacataaacttaccggctctgcaacctcctaaatctggtccgcaagttcaatcaatctcttctcataatccttcagggaatctatagccatctgtttttcctgtgtgttcattttataccaccctttttgtcaaacagtttttcttttatctgctggttcatttcctgaatttcaattttatccggcgccttcacttctatcaggccatattcccgtcctagatgttcatatttggagcttccaaacgcatgatagggcaacagttcgtaatcagacaaatgaggcagtctctttaagaaatctgctatctggtccaagtccttctttgaatcattgattcccggaataaccggggtcctgacaatcagttccttttccggataagtcttgctaagtttcatcagattatccagtatgatttgattatcaactcccgtgaaccgtttgtgcttcgcggtatccagaagtttaatatcataaaataccaaattgcaaagcccggccacccgctccacatcctcccataatgcaaaccctgtagtctcaatggctgtatgaaccccctgttgcttatattccctaagcaattcctctgcaaaatcagcctgcatcaacggctcacctccacttagcgtaatcccgccgttagacctccaactggacgccttgttttcggtagccgctaccacctcctccactgtcatctcctttccaaatatggtaagggcctgggcacaacagccaccaacacaaacatcgcatatccggcacttctccctgtccactgcgatttttccatctttccgtgcattcaccgcctcctggctgcaacgttcaatacaacttccacacgcctcccagccaatgcatttgttcggattataggccagttctgattctacattctgggattccggattggaacaccatatgcagcgcatgggacatccctttagaaaaaccacatcacgaatagacggtccatcgtggactgaaaacttttgtatattaaagacaattcccttataacgactcataacaattcccctatttcatcatgcttggaaagacatggaactgttccctatttccacggtacccgcctgagcattttcaatattaaccctgtcggcccataaagtcgcaccaggataatgctcaaatttcaaacgtcctcccgaacgttcctcagccatttgaatcatgtaatcaatagcctgacctatgggacttgcacctgtttgcacatctgagattctcaatgtatatacatcctcatcatcagttttctccgcctttacatcgggtgctttctgcatggctgcatcagttttcgcctttgtacatcccgacattatacacaatcctatgcctataataagcataactaatcttttaggtttccttttcattctatgtctccctctctgtctatgcaatctcctcatgttccgtcctagcaataatctcattctgcaaagccgggctcaaatccgtaaagtaggcgctgtagcccgccaccctgacaatcaggttgcggtatgaatccgggtccttctgggctttcagcagcgtatcacggtggatgatgttaaattgcacatgccacagctttaaatccacaaaagtccgaagaaggctcatcaggttcctggtcccattttcacctgccaccacctgaggactcaatttgatattcagcagcctggaaaagctattggcataccttctgctcttggcatggtcaatagacagcaaggtggcaatgggtccctgattgtcaacgccctgggttggagaaatgccctcagacagtgcctgcccggccttccttccgttgattgtcgcccccagttttccccccatacccacatgggatgtgacggggacaaatttaatatgctttggcccaaatggtgtgctatattggtgcacagtttccaatagtatttcatccaaccggcgggcaatctcatctgcatatgggtcattcctaccatatttaggtgcgttcagcacagactgatgtatctgttcatatccttcaaagttatgtccggcggcttcttccaactgctgtagcgtatacctcctatcgtcaaataccaatttcttaagaacagccaggcactctgccaccgtaccaaacccattgatgttgacatctccgggatccttgtaaacacttccaggtatattaggctggtgtatgtccatgcagttccccatgcataagtcatgcaggcaggacatgaagggcgccgccagaagttccttattagtcatctccagtgctgtctgtcgtttcatgaaatgccggacaaaaaagtcaaatgtttcctttaaattgaccatcacatcctcaaaggtccttatctccgccgccggtatggatgggaccattaactgtctgtaattgtttccatacttcacatatccatcatttacagccatctcaaaagcagatgccaaattgatgtttcctcctaccggcatataagtatctttattcagcatccgtacttccgtacagcccgaacctgcataatccctggcttcctctatatcagccccattgtttaccaaagcaggtatgatttcctcatcgttcaggaatttcgggaaaccactcccctcctttaccaactcagccgcctcccgcagcaggcggtccggcgtagccgagtggagccgtaccatcaggtccgggtaatggagtggaaattccttctttgaacggatgacaaggtatgtcagctcattggtggcatcctttccatttcttgtctgaccgcttaatgtaagcatctcaaagtgggcgtaaccttcccagaaatttcctgcattcgttgcattaaattgcaggaaatctgctaccttcagccataaacactccattagctccaacgccctctcgtcatccagaatcccagcctccttatccttgcggtaaaatgggtacatgtactggtcgaacctgcccagggctatacctccgttgattgcctgttccagcttgtaacccatctgtacaaaccattggcactgcagtgcctcccaaaaattccgggccggattagccggcacccagtcgcagtttttcgcaatctgctccagttctctttttctagcagggtctgtctctgccttcgccatctcccttgccttatcagcgtatcgcccagccagggtaataagggcatcgcaattgatgatgacagactccaaaaatggaatcttatcgtaatggttctcagacagattgtctctgattgcctcaattttttccaaggcttctgccttcattccatttaatccccttgtaaggactttcccgtactccccgctccaattcagtgcgctggccacattggaattatcctgcatgagccccgttgcgccataatcatcatccccatagataatgtctctggtttcctgcggcataagcgccaagtatctctcatgggcagtctttcctttccagtaagggatgaccttctcctccaggatttctatgtccttatccgatatccggtatgctttctttttccgggtatcgcgcagccccctggaaaaccatcctgccctcagttccggatacaggatagcgtggcgtcccgccccgccgcatgtacccactatcaattcatcctcctggattacaacttcaatgtttttgcatacattttctatcccttttgcccagcggatgttcatgggatacgcctctgtctccttcatggactccgtaaaaaatacggctctctggatatcaatccggggtacatcattccggaatgtctccagaaatttattaatccgttttctcggacttaactgtcctttcttgttgaggatcctctcctcctggtttgtcaaactacccacgcaacagttctccataaatttgtaacctccttattttgccggcctcgcagtccaagcttacaggacgcagcacaacagcatatatgtttataatatcttataaaaaagcccgaataaaccatacctggcagtaaaaataccagaaacagtccattcaggctttattcaccttccatacgtttcctttaaagggaaacgtttcagtcaataaccttatctattcaattttataggacacaacattatgtgtactggcaccatttgctctcccggtacctgaccacagccgaacgcagggcctgtatggtgctgcctgtagccggtgtcaacagattttcctttaaataatccaaaaccggttcaatggggtcatccatacaatatccctctaccacttccctaaaaaattcggccgtcagtggggagattacattcagatgtgctttttccacaatctttgttctcttattgacatataactgcacggatacagtctgatacatatcgttcagattcgtattcttaggtgtctgagcgccaccggcgaccaaaaaataatccttgttactatacatccctgcaagcctcttttccgcagtcttgagacatgttccaacatcactgccaggcatatgatgttcaataacattcattctgaaagccccagcaaacgtctggcattatcccccaaaaaccttttctgggaatcctcatgtatccccatacttctgatacactgaatgctaccgccaagcggtgcaaagggatatgctgacccaaacagcatctggtcttttaaaatataatttgcagccgtcacataatcctgtgcccccggcatattgagcatgaacaaatccggaagcagatagacattggtacaatggtatgccacctgaatcatctgggtaatccacggaaatccgccatgtgctacaattatctgcagtttcggaaaatccagtgcaacatgttccacctgccatggcatggaatagcggatatcctttcctccatttcccccaatcatcatcattaccggtatatgatgttcctcacaaaattcatataaataataaatccgttcatcgtctgcgaacatgggcttctgcaaaacacccggctcaatcaccactgccctgagctttccatttattacatacctttttgtctcttcaaccgcactattgttatctgatgggtcaatgcccgccaatccaataaagtaatccggataacactcaaccagttcctgaacatccgaattatccaccatacctacatgtggattcgctttcctgccggacaccacccctttgtcaattcccgccctgcgcatttctgccatggtcagttccaaatccatcttttgcacagactccggctgctccatcccaatacgtttggacataccggcagaacgttccaggtctctgtacatgatggcattcagatagctcttaaagggtgggcgcagcctgaaatcaattatcatgaattttgttcctcctgttcctttgcaaggttcttctattcatgtattgagcaatttttatgccaatattatattttttcttttaaaacccccaccctttatggctattttgcacaatttcattttaccagatagtaattcttttttcaactgccaaaatatacctttaccgattgtctttctggtaatcagaccatgttcatatccctatgaacagcatgacgtctgtattcttgagtttcattttttaaaccatattttcattttcggaacacccatagaatacatcatgataggataaaccacactctgcccttctccctgccgcccaagaggttaggctgcaatctgtattttgatagttggcatataatttgctttttataacttcatatacacaccaaaaggaaagaagaatgagaggtattaacatgccaaaatgtaaaatcactgtaatcaagaaaaattatttccccgaattggcacaatcctattgcaaaaatccggaagtagggagctgccatgtgtttcaggaaggctttgagactatcatagacagggaagcctatttttccatgacaatcccgggcggtttctgttcggaggcatggcacgccataagccattatgtctacaccgccattcagggcggttctctgatggagggatggatgaaccgtaaggatgtgatgattgcgtgctgtaatgatggggtgcgtccggtggtatttaaaatagaacggattgatgaatcgtaaaagcgaagaaaaagaggacgtttcagcgaacgtcccctttttccttttaaatatgattttttccctattcttctatcagcggtacccctaagttgaaatacgaaaacacacccttagcaaccagcttgcctgaatcgtccgatatctccacatcgcagacacagattttcttcccgtccttaatcacctttgccgctgcatacagcatcttcgtacccatagccggggagagatagtggaagtcgccggacgcggttgtcatacgcataccgtgggaagccgctgcagcgcctcctatggtatcggcaagagaaaacagacagcccccatggacagaatggatgggattcacaaactcttccagcacttccatctctcccttagcagccccaaagctgatttccgtcgttacgatgcctagaaatgccgcaaacttattgtgggtgttcctgtattttataatctcatcaaacgttgccattccaattcctccactttccgctttcatataaaaactatacttctacatcccggcctttaaatattccaccagccctccggcttcaatcagccgtatcagatggtccgggatttttgagcatacatactcctcgccacgggtcaggtttttaattattcctgcctcatagtcaatgcacacacaatcattttcctgaatccggtccgtttcctcacattctaccacaagcagccccacatttatagcgttccggtaaaaaatcctggcgaaaaatttggccacaatggcctccacccccagatacttaagggacagcggcgacgtctccctgctggagccggagccaaaattatctcccgccaccaggattttctgctgttttacctttttggcaaactccggctccacggcgcccatggcatattgggaacttgcctctatgcccagttccatatactggggcggtgagatgatatccgtgttaatattgtcgccaaattttatgacatacccttgtctattctccatatttacacatctcctctcacatcacattccttgggtccgttatatggcctgtcagtgcgcttgccgccacggtcaacggagaacccagatagataccggcctccttgctccccatcctgcctataaaattccggttggatgaggaaatacagttctctccccctgcaatcatgccggaatgaagtcccacacagacaccgcaggtaggcgcgagcacggtggcgcccgcctctgctaggattttaaggattccgtccccatctgcccttctccatatctcatccgatgccggtgaaaccaaaaggcggagccccttggctatgtgcttcccttttaacagttcagcggcctttgcaaggtcatagtaccggcctcccgtacatgagcctatgtaagcctgatgaatcgaggtttctgtcacatttgccacctccgtcacattgtccacctgatgcggacatgccaccatgggcgataattcctctacattaaagttgcaggtgcggcagaatattgcatcctcatcgcttctaagtgaccattcttcttcctttatcccttccgtccccccatgagcctccaggaattcccttaccttctcatccggttccatcagacctgctttggctcccatctcaaccgccatattggtaattgccatccgctcatcaaccggcagttctgaaacggctgtcccaacatattccacggtcttataggtagctcctgcgtgaccgattaccccaatggtcttcaacgaaatgtccttggccatgactccagacggaaggcttccatcccatacaaccctgattgtctcaggtactctcatccaaatctgtccttttatcagcacccccatcatctccgtggagccaatgcctgtggcaaaggcgcccatggcgcctcccatacaggtgtgggaatccgtccccactatcacagtccccggtctgacaaatccatgttccgccataatctgatggcacggacccacaaactcaaagtaattgccgataccgtgttcttttgcccaatccctggtaaattttacaatctcagcttgtttgatggaagccggaggtgtatagtggtccgatatgatgaccactttttccttatcccagacctcatctttgatttccttcatatgttttgctatttccacccgtggcccaagaatatcatccatcatggcccggtccacattgacccataaaatctcgcccggcttcacgtttttccttcctgctgccctggccaggattttctctgacatagtctgccccatatgtagccctcctcgttatgagcacttggagaccgtatttgggtctcctacgtgcgatacatgtcactggcacgtagcgggtgtcttttgaccgcttagtgcagtggctcgttatgatacatacaccgtgccatccataatcatcctggccgtgcggaacacctttatactcttgatatccgtctgtccattgctgttatctgctcttgagtatacctccaacaccccggccggatggccgatgcgaaggttttcccttttccttgattccgcgtccatcacctcccagggtatgcttccaggaatccttacggccgcaccggtgcagacggttcctgtgatggggtatgccttgtgcatatggagcatgaacagtaggcgggacacaatatctacatcctccctcttaacctccgccccattaaagcagcggtaatcagccggactgcttacaatggcaaaaaaaggattgtaggggctctgctccctcgcatcttccggcctctccaccaagccaaaacgcacagctgcctcactgcgtatcttctcaatccgctccatcagttccttattatcctcaatctccgccggggtctcgaatcccttcatccccaggctatcggcccggatgaaaacaagggggttgccggcgtcaaccagggacacctcatactcctgcccatcaatgttgaatgtgtctttgggatttccagtaggaagcagcctgccgcagacagtccctgtgatgtcagaccaatccatatcaatcctggctgccctgccgggaaccccatctatagaacagtccccttttacctttgccctgccatgttccaccggaaccttagcgatcaatatctggtcactgttagtcaaatggatgcgcacggtcgtcaccggctccaccgccttcacaagtcccttgtctatggcaaatggccctaccgccgatgaaatattgccgcagttgcccttatagtcaacaaattgtctctcaaagctcacctgtccgaatgtatagtccacatccgcgtcttcccttgtggatggtccgatgattgccagtttgcttgtcaatacatcggccccgcccagcccgtcaatctgccggatatccggacttccgaatatccggcagatgagggcatccctgtcaggctggtccgcgggcagttcattttccatgatgaatatgcccttactggtaccgccccgcatgattgtacatttatattccttcatttcagggtgcatcctcattctcctttttcattcatctgtcattaacgcatgactccggtatcgccaaacagctcctcgtctgtagggacagccctgctgattcctgttgccagccatgtatcattcatatagtgctttaaagaaatgttttcagaggcgatatttcctccccatgtaccgcaccccagtgaaggtgagaaggggtgtcccgcattccagtcccccgtgttgaccacgctgttaggcagattattgttcacacggcatgtatgggtattgagagcaaactttatgatgttatcctcattatgggaataaataccgcaggaatggccggctcctgaataggcatggttagcattgacccgctcaatagccccgtcaatgtccttgcacttataaacagtcagtaccatgcacagcttctcccctgacagcggataatctgctcctgatccagtctcctccaccatgatgaatttcgttccttcaggaacctcaatatccgccagcctggcaatcgcatcaatcggcttggcaacaatatcacggttcaaatcatgattggccggccattccgggaaaatggccttctgaatcttgtcatgttcttccggtctgcacatatatccgccctctgccttcaacgcctctatcatctcatcataaatattttcatagatgacaagcgcattgtcgcaggaacagcccgcagccaggtcgcccgtcttgctcagcatgatcttatgggcggcatctttgaaatcagccgtatcgtcaattgccatgatggcatttcccgcccccacgccgtaagccggggttccggatgaataggcagcctttaccatgcccgcgcctcctgtagcaattaccaggtcagcctgcctcatcagttcattggtaacagccaccttcaccaggtccacacactgcagtatgtccgccggagccccattcttccttaaaagctcacgcattttctcaacggtctggtaggtggtcttctttcccctgggatgaggagccatgattactgcgttgcggcttttcaccgtacacatggcggtggtgatgggaatcatctcaggctgtgtgctgggaatcaaggaaccgatgacgcccaccggcttcttaattctcctcataccccgctccggaatctcctccacgatccccacagtcttctcatgtttgatttccatgaacataccctttactttcttctcaatcttggcgactttggaatcgtaatccccaagctccgtttcctccagggccagggctgccagctctgcttccatttccggccttgtcatctcataagcaatgacggagcaaagcctgtcaacctgctcctgcgtgtatgtattgatgatggcctgcgcctttcttgccctctccatatattccccgatgtatgctgcatagtctatctccatcttttcgctgctcatgttatatcctcctctttttccttgatttttattggtcttttatactgttcctttgtcttgtcaggcccctgcctggcacatgtttgatatcctgcccgtaagggacgcatcaactttccccctcacaagctccaccgcttccaggtatcgctccatgtcaatatggtggtctattcccatggcatttaccatgttaagcatatcctccgtggccgtattgccggcgctgcccggcgcaaagggacagccgcccaggccgccgatactggtctcaaagatatggattccctccagcagtcccgcatatatgcccgccagccccattccacgagtatcgtggatatggagtccaaatttcacatcgggaaaccgccggagggctaatcccactgtattccttatctgaagcggattggctatgccgatggtatcgcaaaggatgatttcccggattcctgcctcatgaatccgctccaccacgtccatcacccgttcctggggaatcctcccctcaaagggacaaccgaagctggtagccagggataccctgacgttgatatcccgaaagctgtcctttatgtccctcagctcctccagcgactcactcacgctgcggttcacattctttatgttatgtgattcgctggcagacaggacataggtcacactcttaagccctgcctgtaccgcgtttgacactccccttttatttggagccagggctatggccctgaaatcctctggagcatccttaagtatctccgctgtcacctgagccgcgtccgccatctggggcagccatttggggttcacaaaggaggtaatctccatctgccggattccggatgatatcatcgcccgtatgatggcaattttttcatctgtgggaatcatggcttttacattctggaagccgtccctggggcctacctcaacaaccgttatatctcctggcatcatcatgctggccacctcctatatgactccgtcttccttcattttattaagctgctcctcagtgaaaccaagcataccgccatatatctcacggttgtgctgtcccagggccggggccgggctcttaaaccctggttttgtctccgtcatcttgatatgggaattagtgaccttgacggctcccacatccgggtcctcaatctctatgaacatttcccttgcccctgcaatatgcggatcctccgtcacctgcttcacatcgtagataggggctgtgggcagccctgcttccagaagctggtccaccagctctttcgcagtcttggtcatggtccactccgtcacgataggtttgattttatccctgttcctgacccgatcaccattctttgccatgtccggatgatgaatcagctccgtcctgcccatcatctcacaaatctgtctccagaatttatcattggccacgccaatcaccacatgctgcccgtcctttgtggggaatgtgtcgtagggggctgtggactcgtatgcatttcctgtccttcccggtatccttccccctatcagataaatttggttgataatctgcatcacgctcaccaggctgtccaccagtgcaatatccaccttctggcccctgcccgtcttctgtgcgtagtggagcgcggccaggactcctgccgccagggaaattcccgctaccgtgtcggataccggggctcctgccctggtggcttccccatccggccaaccagtcacgctcatgatgccgctcatggcctggcctacaatatcatatcccggccgcttactgtaaggaccatagtggccgaatcctgatatacacccgtagaccagctttggattgacctttttaagctcctcatatccaatccccagcttctccatggtacccggcctgtaattctcaatcaggatatccgccttcctgaccagctccaggaagacatcctttcccttcttcaggttcaatgtgattcccttcttattgcggttcatattcatgaagtaaccgctttttccatccttaaagggcggaaaccccctcgtgtcatccccagtgccgggaacttccaccttaataacatttgcacccatgtcggacaaaatcatgctgcaatacggcccggccaacaccctgcttaagtccagcacggtcacgccatccagtgcacctcttggctcctccattcttacacctccaatgaaatattaaagaaaaattatcttcactatttcttagagcaaatttcgtgccatttttatcatcttctattttttctctttgcatttcctccagaatgtggtccttccaatgcccagtgctttcgccgccatctcctgattattgtcaaattcttccagataacgatttgccacctcgtattccaccctgcttacgatatcgctcagttccccgcccagttctatctggatttccattgtattgcctgttggcttatgaggggatgtgcccaggatttcatatagctcttcctggtttaatatctcctgatttagcacctctgacagcacaccgtagcgctccatgacattttgcagctctcttatgtttcccggccaggaataggatgttagcatggggattatgtccttcatctgcttggaagccgtaccataccctgacaggaaccgttccgccaacagttggatgtctcccctccgttttctcagaggcggaatctggatttggagcacgttgagacggtaatagaggtcccccctgaactccccgttctttgccaaggctttcaagtctttgttggtggcgctgacgaccctgacatcaataggtataatccggttccctcctacccgcatgatttccttttcctgcaggacccttaaaagacgggtctgtacactctttgatatttcacctatctcatccaaaaacagggttcccctgtgggccagctcaaaaagcccggctttcccttctctcttagcccccgtaaatgcaccggattcatagccgaacagctcgctttccagcaggttttcaggaattgctgcacagttgacagccacaaagggcccctgggccctcgtacttgcattgtgtatgctttgggccatcagctccttgcccgtaccggattccccctctatgagaatggcggaatccgtctttgcatatgcctctgcacggttcaccacccgtttcatcccttcgtccccggtaatgatatcctcaaaatggtatttggctgcaaatccctttaaatgcaattccttgcgtattttctgttccagttcctgggtctttgtgacatcctccatgcggctcaccacgccgataaatttcccgtccttggtaataggggaatgtgccactgaataagtctcttttttcatctggcgcagatatatgggtacttcccgatggctcatatatacctgcctgcatttgtcattaatgatgtcgtttcccgcaatatcacctacctgatagctgtggtcaaatagcttttgggcaatggggttcagtaccacaatgcggttctcatcatccgtgaccacgaccccttccttcagtgaatcgtaggcagccttcaattgtactgatttatattgctccttccgtttctcatacaacatggatatggattcctctatggcacggtccacggcctgctccccggcactgacctgataccctgtaatgcccagccctttggcaatcctgactgccacctctccccctatgatggtccggattcccttatcataggcgtccttcaccgcgttctcaatatcaaaataattaatgaatgaatattcgtgaatcttaatcccgtacatctgcgcaatttcctgtattccatatacatttttcatatagtggatgaatgcggtttccttaacgtccttgtccaattgatgtacgattttaatcacgtcaaagggggtgatgggaatgaacacaacaggcacattcaccgcattttttatttgtgcggctgtcccccccctgctgaggattacgtccacctctcccttccttaccaggtttttagctatctccactgcacgctcaaaggacgcatactcgcttctggccaccacgttttccctgccggacgccagtctcaaaaaaatttccgccatgcttggataagtggcaatcagtgccatctttatgaccttacccataatttttacccccttggaatatattttttattttaatcataaggatggagcgccacttttgtcaactgtttgtttcaaaaatgaaatttttttcaaatttgaaccataaaaacgcagacaaaggctttgaaataaaaacagctcccacaggtccgcctattaccgctaccagtgggagctattttatttactctataattttcttaatttgcataggtgccggtcaatgtcacatgttccagaacatgtccttccatagcatgaaacaaatcattgagaaagaatccattttccagtcccagcttccggtccagcgcaaagacgtgaagttcatacgtatgcggcgcgttgggcggggtcatgcctccgtagcctacagcgccctccctgccgtatgtgccgaaccagctgttgattccctggacataatccgttgctccgacgctgtcattctccttgattacatttttggtaatgtccgcggcaatccaatgaatccaggagaacccgcatacgggaactgcatccttgtcctccatcaccagagcaaaggtaaccgtaccctctggcgcttcctctatagtaatgggaatggagcggctgggcacgccatacccgttcatgtcctttccccttttcccatacttgtccggaatcaccccgccattcattgcttcactcatcactttcatttagaatacctcctgaactatttgatatgatgatttaagagcaacaaacatgccaatagttatgattttggcatgtttgttgctcttaaatatttacagatacaaatataaatcaaggaggaacaccatggaatattcaaatgaaatgaaccggatggtttcggtatgcagatgccataaccacggagcagcgccgattccccaggaaggcacattcaccccagtcagccaaattggagaaatttcaggattcagccatagtgtgggaacatgcggcctcaagcagggggcctgtaagctatcccttaacatcaaggacggtatcatccaggaggcgctcatagaggtaatcggctgcagcggtatgacacagtccgccgccatggcagcggaaatcctgccgggcaagaatctgctggaagccctgaataccgacctggtttgtgatgccatcaacgtggccatgagggagtacttcctagccatggcatatggccgcacccagactgcttattcccagggaggactggctgtgggtgccggattggaggatttgggagacgccaggcgaagccaggtgggcacctgttacggtaccctggccaaaggtccccgctatctggagctgaccgacggctacatatcatacatcggcctggacgagcaggaccgcatcatcggttaccagtatgtgaatctcggaaaaatgatggggatgattgcggatggcattccagcccaggaagcactggaacaggctatcggcacttatggacgttacaccgaggctgcccgcaccatcaaccccaggaaacagtaaaggagggaatgcgcatgatacaatttgagaattctggcctaaaaatggaaagaatcacagaataccttaacaataacggaatttctgatttaaaggaagccaggcgtatatgcgaaggacataacattgatatttttaacattgtacacagcatacagcccatctccttccaggatgcctgctgggcctacacggccggagctgccagtgcaatcagaaaggggataaaccgtgccactgacgcggccctggaactgggcgagggattacaggccttttgcctggaaggatcggttgcagacgaacgcgaggtgggccgtggacacggaaaattggccgctatggtcctgtcagaggacgtacactgttttgctttcctggccggtcatgaatcctttgcagcggctgaaggagcaatcggcatcgcaggttccgcaaacaaggtgcgcaggactccgctcaaggtcatcctgaacggcctgggtaaggacgcggcagaaatcatatcccgtgtaaacggattcacctatgtacggaccgaatttgactttagtaataacactcttacagtaaaggacaggattcctttcacgcaagatgccagggccgatgtattgtgctatggtgcaaacgatatccgggagggaatcgccatcatggaacatgaggacgtggacgtatccatatccggaaacgggactaatatggtgcgcttctcccatctggtggccggtgcctataagcgaaactgcggcctgaaaggaaaatcctatttcgcatgtgcatcaggcggaggaatcggccgcacgctgggccccgacgaaacagccgccggtccagcctcctacggactcaccgattccatgagccgtatgtatggcgataccaccttcgccggttcgtcctccgtccccgcccatgtggagatgatggggtttatagggatggggaacaatccaatggttggggctactgtaacgattgcagtttctattgaggaagcagccgaggctggtaagttctaaatagactttacaaattgaaaagacgttaaacccaggaagtaccgtaatcacagcgattgcggtacttttttggtgcctggaagtggaaaaatgaaattgggtgtgagatggtgtaaaaagtggtgaaaatgggaaagtaggaaaccggtaggtaacaagtaggaaacatggagaaggtaacactttttcagttacctgcagaatgcggaaataccgcaaccacgagggttacggtatcttttccagttcggctctgagccattctaagtcacggtctgtataagccgcctctgttatgtcggtgattctgtgaccgacaagttttttgatggtgtattcgtcaacctcggctttctttgccatggtgatgaatgtcattcgagggtcgtgcggccgatgatcgtctctgagtttgagagcggcgatcactttatcgaaacggccggcatatttgtcgtaggtgattgccatgccgccctttggagaatccggatcattaaagagccggtggcttccaagttcaagggcatagtcgtagtttttcttaaccaggtcaaatattttcgggtggataggcaccatacggtgtcgcccggcctgtgttttcataccaccgacaatatagcgttcttcaagatgcacgtcctctagttccagtatggcgagttcttgcggtcgccatcccatgtagcactgtatgagaacccagtccacgaaccggattttgccgacgttttcccaaagcgtctgcatctctgagtcctggaagatgaagtggccacgttttgcttcttccttttctttgatgatgtcgtccgacagttcaaatgtgcgggagtagttcttatcaacaagctcatattcgagcgcatagtccagcattaaattaaacatagacttgatccgggattttgtgcctgcagacgcaagcaccttttcgcccttattggctccacgtgaaggaatgatgtagccatcttccattatgcccttgatgtggcgggcacgcaggtccttaacacgcattccggcaatggcgtggcagtagctccatgctgacttgatggtacggcaggatgattcactttccagggtagggaagtaagctgcagtccatttgtcgtagagttccgccagggtcatagcggcattttgtatatcgtaaggattagctccgtactcagcgagtgcctgcagagcttccttcttagtcttgaatgttccaagaggaacacggttctgcacggtctttccggtctgttcgtccgtgatccagcctagagtaacacgggccaggtaaggcttacgacggtttccggaaagttttgtcacgctgccgtagccgttaggtagtttcatttgacaaccttactgattccacagccgcaggcaggccagcgaaatccgtttttgttggttcgagtttaaggagagaagagagcgtgattgttttctgctccggcaccttctcattaagaaccgaggtgggtagaacataaaagtcccagtagtcgagatcaagaattgaaacatcacgtgtacgagcggtaaagacgcagaacacatacaaatcactgttacgcatagccatagaggcgtaggtagctccatcccaggcaaatttctttgcaatgtcgaagctaatctgcgagaatacatcttccggagtccaagcctgcagataggcagacgacttgacctcaatgcggagaccggaaggagaagtaaggtcgaacggtagccagtcggcacgtgcgacatcttttgtttccagggcagagtgtacgagaaattcggcaagcactccacggtgggtattgttgagcagatcagaatacgcccaacgccaaaaatcctgcagcatgatagaagtatcggaaccatgcagggtaaatggttcattgccgtttagttgttccatggtttcctccgtatctttctaggagcgtccataggacacgcttatcgtcgctggaagcgacggaatacaaggacacgagcattttatcgtccgggacattatgcagtccaagaaggtaatctacggacacatcgagggcatcagccagtagtatgatattatcgacggtcggtgttcgcagtccgttgaggtagcgtgagattgtagcggcagtcacgccggaaagagcggcaaggtcgttaccgttcaagtggtgttcctgcatacaatgcgacagacgctctgagaatttgttaatatccataggcgtaaccggagataccggtaccacgtatggaacagtctaaaagtttcttgcactcagagtccgtaagcggaccgtatgagtgaaccaatccgaacaactgcaggtcagtgagcataagccggtgctgcaggtgccggatctttgctacgacaccgtaagagcggttcctggtgccgtgattgcaactgtcacaaaaagaggagagataaagaagcaatgcagcggcatcgttcccggacctctcctcattgcgtgccagctcaaagtatttgttattcataggcacatctcctcagtaccggccgtaaagtcggtaccattctaaactgataatcttttttctttgtcgaggtatttctgagactctgtataggctttcagaaatcccttgagttccccgataaactcaaattgtttgttctgtggcaatgcccggtacagttcgagaagttcgtcctcttctgcagtggtgagcttgcgggcaggagcctcttcgccggtcaataggtaatgaactgacacgcccaggaagtctgcaatcggtttgatgtatttcgctggcgggtcgctattgcgagttttccaggtagacatcgtagatgtccgaatgccgaggtggtcgcacagatcagtagcctttttgtccgttttttcaagggcttcagtgattctttcgatgatttccataggcaacctccgtggtaaaaataatacgcaaataagagtaaaaacatttacaaactcgcagatacgtgctataataaatatatgaaatacaaaacaactcaaagttgcgagccgagagattgtgcttgtatttcgtgcgtctgtttgcgagtttgtaaagaggtttacttacattatagcacgcaaatcagaaaagataaatagtttttacacaaatgcgagaaaggagtgaaacgcaagcatgaagcaggaaacatcacagtggggcaaagctgttaaaaaagcagtaatcgaccacgatatgacattgaagcagctggccgaaaaaatcggttacagcaatgcgactgtttcccaggtagtcaacggcagatattccaattcaagttacaaggtaatcgctgagaagatcaacgaagtgcttggaacggaaggactgccggagagaaccgaaacaccgtccgatgaatggtgtcagacagtgaaggtggaacttgtaaaacagagcatgaccgtcaatgagctggcgaagcagctggatgtctccagggatcggctgtcactggtaattaacggcaagatgatgaacgaagcaatcgtaagcggggtgaataacctgctcggaatcaacctggtcgctgttccagctgataagtaaattatagcggaagggtaggtaacaagaaatgggaagaggccctacaaacgagaacacaaatatgtatttccaggccaggaaaaaggcggcaacatacaacgagagactatggagccgtgaaggagctgcagaactgttgggaatatcggtttcaacattggcagattatgagcttggcaatacgaaggttgtcccggtggacaaggtggtgcttatggctgacctctacaacgccccggaattgattactgggtactgtatgcgagaatgcccggtacacggattcctaccactggcaaccgaagagaaaagtttagaaggaattgcattaaggcttttgcagaacttcaatgaggattcattgaagaatatgcgagacagtctgatcgagataactgcagatggaaaaatcacaaaggatgaattaccagccttggaaaaaatcatcggacagctcgaaaagatggcagaggtaataagcgaaatgaaaattgccggagagaagtatttgaacggcaagtaagccggagcaacgccggaaaggagttcagaattgaagaaagcaagtaagcgaagaatattgtttgcggcaagaatggcaacgatggtcggagctgcctgttttgcagtgagtggcatttcagaaacgctcgggcaggagaaagaaaaaagccggccggtctacatagccacagaggaagtggcagagacgacgtatatgccggaggttgaagagacaacacagccaacggagacagcaaaggcagttgagacagaagaaccgttgattgcaagtatggattgggacaaggacgattcttacctgctatgcaagatagcaatggccgaagctgagagtgaaggcgtgaaaggaaaggcgctggttatgctggtagtcctcaacagagtttggagcaatgagttcccggacacaatcgaggaagtgatttttcagaagaaccagttcagtccagtaacaaacggaagatacgacgcagtagagccggacgaggagtgctacgaggcattgaagctgatccaggtagaccattggaacgaaagccaggatgctttgtattttgagagcaagagcgacagtaagtggcacagcgagaatttggaatttcttttcaagtacggcaaacattacttctataagtgaaaggaacaggcagtatgagaagatttagaaagaaagtcagaagatttgtgagactgtattggttttgggtaagcctgggactggtcctcacaaaagtatcggttgaagcagcgtacatcgagagaggctataaagcctacggcggtgagtggctggttttaccagtggtgatgatcgtcggatattttgtaaatgaggcgagaatgtacctgccggacttcatcgaagaatggagagaggagaaagcctatgagcgaagagttgcagaaaatcgtagacgagtacagagagaaagaaattcacatctcagatgaagaggctgagcaaatcttatggttgtgcaaccggaagatggatatatgcaagattgagaacagagaggaatacctgccgttgttattcaaggacgaggttaagaactatctgttcagatgctcggtaaatgctacgacgtttttgagaagattggaggcagaaggaatatgtgtgcagaatgcggtatgaacccatgccatccaagatgcccgaacgcaccggagccggtaccggttcacgaatgtgtgaaatgcgggtatggaatcctggtaggagataagttttgggattctccggaagggaagatttgtgaagaatgcgtggatgatatgagcgcagaagagatattaaagttgtgtggcgaaagcctcacggaagcagaaaaggaggaaaggtagtatggcagaacagaatgcagtggcaacacagcagggaacacagttaagtgtagcagcgcaggttaagagcatgatttcccaggatgcagtaaagaagaaatttacggaagtcttggggcagaaagcaccgcagtttttggcatccattacgaatgtggttgctggatcagcacagttaaagaaatgcccggcaacaacaatcatgagtgcggcgtttgtggcagcaacctacgatttaccgattgacagtaatttggggtttgcggcaatcgtgccctacaacaacaataaatacaatcagcagacgagacagtgggagaaacatccggaagcacagtttcaaatgatgtacaaggggtttatccagctggcgatccgctccggatattatgaaaagatgaactgttcggttgtctacaaggacgagctggtttcatacaatccgattaccggagaggttgagtttgtgacggacttctcgaagtgtacgcagagagccgaaggaaaatcggagaacatcgctggatactatgcctggtttaagttattgactggttttagaaaagaactgtttatgacaacagcggaggttgagaaccatgcccgcaagtattcgacagcgtacagatatgacctggaaaacaataagaagggcagtaagtggacaacagattttgaggcaatggcattaaagacggttatcaagatgctcctcagtaagtggggtattttgtctgtggatatgcagagagcaatccaggacgatcagaaagtttacgacgaggacggcgatggaagttacggcgacaaccagccggacatcgtagaggcacaggacccgtttgataagatcgagcagaaagaagaggaacagcagatcggtggcttagatttggaagaggttgaataggaggaagaagaatgcagctgacatcagaaaattattatagccaggaggctaaccaggagtacatgagcgtatcgggatataaggattttgctggaacctacggcaagatgccttgcgagttctacggaatggagaaactgaacggacgctgggaggatgaaaagagtacagcattgctggtaggaagctatgtggacagttatttcgagggaagcctggaacagttcaaaaaggacaatccggaaatcttcactcagaagggagagttaaaggcgaacttcaagcaggcagaagagatcattgctcgtatcgagcgagacgaatacttcatgaagtatatgagcggtcagaagcaggtcattatgacaggagaactgttcggagcgaagtggaagatcaagatggactcatacattccgggagtggctatcgttgatttgaaggttatggcatccattacggatttgaagtgggtaaaagacatcggctatctcgattttgtccgttactggggttacgacatccagggtgcggtctaccaggaaatcgtgagacagaataccggcgagaagttgccgttcttcattgcaggagcaacgaagcagacagagccggacatccgcattatccacgtaacagacaactatctgcaggaagcgttgcacatggtagagatgaatatgccgagaatcctcagagttaagaatggagaggttgagccggacagatgcgaattgtgcgattgttgcagacacaacagagtgttaaagaagccaatctcgattatggacttgacagcaggcatttaaggagataggcggtgactgaatggcagacaacagaaaatattactacctaaagctgaaagaggactttttcgacacggacgagatgaagattttggagagcatgaaggatgggtatttatacagcaatatcctgctgaaactctatctgaaaagcctgagcaattccggcaggttgatgtatagaaatgtgattccgtacacgccggaaatcctggcaactttgacagggcaccaggtaggcaccgtcgagaaagcattggatgtattcaagaagctggatttaatcgagatgctcgataacggagcgatttacatgatggatattcagaacttcataggccagtcgtccagtgaggctgacaggcagagagaatattacaaccgcatgaaggccgagaaggaagcactggcaggagaaagcacagaaacgccggaacttccggagccgaaagaaccgatactacctgcagaacagaagtcaaataaggcgattggtaattacacaacggatttcgaggaattgtgggaggcgtacccaaggaaggttgataaaggacaggcatacaagaagtataaagcacgcctggaagatggtttctcacatgagcagttgtatgaagcagtaaagaactatgcggcacagtgtaagaagcagagaacggagacaatgtacataaagcacggcaagacattcttaggagagtcaacgccgttcctggactatctgccaaaggacaagccggcacagagcgaagcagagtacgacgacaacgagaatccgttcggaaggagtgagtgacgatgaatttggatttgcagaaggttttacctgcagaagcattcgagacagagcagaatgagggcgactacatcggcaaagacggactgctttactgcggagtctgcagaaccaaaaagcagaccaggttgccagcgtcggattttaccggcggcagggagataattgttccatgtatctgtaagtgcaaggttgaggagaacaaacgcaaggaagaggaagaaaagaagagacaggaaatgcagcgtttggaaagattgaaagccagcagccttatggacgccaagctgaaagcggcaaggctggacggataccaggtggacggagacaatcagaaaatctacaacctcgcaggcaattacgtgaaaaggtttgatgaaatgtacgagaaacgccaagggttgttgttttgggggacggtcggaaccgggaaaagttacacggccgcctgcattgcgaatgagctgctggatcagatgatcccggtggttatgacatcattcgtgaagatactgcagaacatccagggcaaccccgacgaggaagagagaataatggcgggactgaatgtagcaaagctgctgattatcgacgacctgggagcagagagaagtaccgattatgcgttagagaaggtgtacaacatcatcgacagcaggtatttatccggaaagccgctgatcctcactacgaatatgacattgaaggatatgcaggagtcagaggacatccgatacagacgtatctatgacagaatatttgagatgtgctttccggtaaggtttgcaggcagaagttggagagaaaaggcggcgtcgaagaggttcgatgccatgaagaatttaatggaggaatgacagcatgggattgattaaggtagcagaaatcagcattgacaagctggaagatcgcaagacggttacggcaattctgcacgagaacggttataccgtcgggccaggaaagagaaaaaagacagagaccggaaagcagttagattactacttgaaggtgtatgtggaggaaggcacagataaggcagaactctacaaagcaacaagcggaaaaacgaaggtgacagccaagaaggtgacggataagatgtcggccgagattggcgacaaggcataggaggcagaaagtggatgaagatatgaagcagattcgtttcacaataccaggacagccattcgggaaacagagaccgaagttttcaagagctggggcgtatgttaagacgtacaccccgaaagagaccaccagttatgaaaacctggtgaagctgttttacaacgaagcagccaaaggaaagatgtttccggaaggggcaatgctggatgtaaggataattgcatattacgaaattccgaagtccaccagcaagaagaagcgcagggaaatgttggaacacaggatcagaccaaccaagaagccggactgggataatatcggcaagattgtttgcgacagtctaaacctggtagcgtaccacgatgattcggcagtcgtggatgcacaggtaaggaagttttactcagaaacgccgagggttgatgtgatgataaaggtcgtaggaccggatcaaatttaggaggtaggcaatggcaggaagaaagaaaactgaaacagtggaagcagaagttgttgagacagcggtagtaccggcagggaaaatggagttcagactgattaacccgacagaggatggtttcctcagacgcattcagtggaacaaggaagagctggaggctgcagtaagagccaagattgctggttacgagaatgtggtttacacagaggaaaacattaaggcagcgaagaatgacagggcagagctgaacaaactcattaaggctattgaggagagaagaaaacaggtaaagaacatcatcaatgagccttatgcagtgttcgaggcagagctaaaggaaatcacggcacttatcaatgagccggttgcactgatcgaccagcaggtaaaggcgttcgaggagaaacagaaggaagaaaagaaagcggctatcaaggctacctacgatgaaaatatcggagatttggccgaggtattgccgtttgaaaagattttcgacagtcgctaccttaatcagacatataagctggcaaccgcacagaaggaaatcgtggacaagatcgacacggttaagacagatttggagactatcgacagcctggatagtaagtataagctgaatgcgaaggatgtgtatatcaagaccctggacctcagcaaggccctggcagagaacaagaggctggcagacctggaagaaaaactggaagcggacaagcgccgtaaggctgaggaagaggccgagagaaaacgccaggaagaaatccgcaagcagaaggaagctgaggagcaggcaaagcgtgaggcagaagaagaggagcgtaaagcggcagaagctaagaaagcacaggaagccgccgcagaagtcgaacagacagaacctcagtccgaaattggtaaggtaatcgagtccattgagagatcggcattctcccaggcaatagctagagaggcgcaggcggcaccgacagagcaggcagttgatccgttcgctccaaaggaagaacctaagcaggaaaagaagtacagagtacgtttctttgcagacggaaccaaggaacagttgggaaaactgattgcttttatgaatgagaacaatatcaaatacggcaagattgcaaaggagagtaagtgatgaatgattttgacaagaaattggatttcgacagcaataccttcgagaatatgaagcacgatatgaattttgttctgcagagacttcttggaaatatgattgagaagcagtccaacgaaggaagtatgacaattaagattgacgttaccatggtgaaggaatttatcccgaactacgacccgaatatcaagggagagtccagggagattagcaagcctcagttcaagcacaaggtcacatctgcagtaaagattaccgacgagaaaggcggaaatctcaacaacgagatggagatggttatggatgaagagaccggatgttatgtattacagccgattgcaaacacccagcagagaacgatttttgattcagacttcatgcaaggtcagaagcaggaaggtgaaggaagcgaggatattatcgacggtacatacatcgacgcagatgtgagaccggcgttacctggaccggcagatgaagagaagcctgcggacactgaggaaacagacacccagcctgcagaggaagaaacacaggcagaagagaatggcgaagaactgggagacacaccggccgaggaacctaacgaggaagagccggaggatattaccgacgacatcctgggtgatgcagacacagaaggttacgattacgaagatccggaggagtagatatgggactgatgaaaccaagagtgagcagttatgtagacagaggcaatgagctgattgcaaagggcaagaccaagcaggcaatgaacctggtgagccacggtctgcagtattactcagagagggttatcgacagcatatctccatacgctaagaatgacgcgggactgatagttttagtcctgcgccacctggcggatgaagttgagaagaataacccaggagcaaaggagctggcggccggcatggagaagtgcgtaggcaagccttctctgcaagagattgagaggattaagaaaccgaacagaaagtaaggaggtagaatgaatacaccggagagcgatatggagcagatgaaatttgcgagagaatgggtaagagcgcacgctgcaaagaagatggcaaagtatgagaaaaagctgagaagagctgcaaaggatttcttcgggcatccggtagcaatcgcatatttgaagcctggcgtgatgcttgaaatcaaagatgccggagaaaaggcaaagattgtagcggacgaagagaaaggataaatgacatggcaagaggtttcttatacgtgtatgagcggatatacaaaggagagactgagatgcagactgagttccggaagataccggtcaacggtaagcgaacctcagtggcagatcagaagagagtccggaagattatctcagataacgcacatagaatagcgcaggaatgctcggtgttggtgagctatccaaaaatgagaattgagggtactgcagtcaacctgggagatgtgcatataatgctcccggactgcagaatcatcgacattgaggaattgaagaaaattgagcgggggggggtgaaaagttggtagaggtatatttaagaactatagacggatgcgagaaaaaatttatcggagacataatcatcaacgacgataccgttcaatacatcaaagaagatggcagcggagagataatatacaaaaagtatattagcgaactcagaatagaaggcgactgtccgcaggttgaagccatggggaacgtacatattcaagcaccgtgggaaagaatgacagcaccgagatataacgagtacaaggtagggccgaagcatggatggtaaagaaatgcgtaagagcaggaatcaagaaaaagagcacatttatgaagaatatgcaaaagcgattagagagtgtggagaaaagtatatcgggcatccagtgacagatgcagcaatatacgacataaatgctcgcatagatcatattgcaaatgtgctctcggaagaaaccgggttgaatatcgttgccggtccagtaacagtgaatggagatggaactattgaagtgatgcagccgataataatgtttccaaacggaaggttcggcttgctagaatacgcatttggcgattaataagaaaggagtgataaaaccccatgaggtcctacaatccgttcgggacttgcaggaactgcgggtgtcagattatgtgggttaaaacaaaggctggaaagaatatgccggtagaccctacgatgatcagctaccgcaggccaggagcgggagcaaaggcaaaggaaaagatagtaacgccggaaggcgaggtcgtatgtgctgataaggtatcatccgagagcgcagaaggctttggctacatatcacactttgccacctgcaaggcaagaaaccgttgagaaaaagaaaagccgcccctttgacaggaacgactcgcgactgagaatattatactcgcaaatgcgagaaaagtcaaggaggcgacattatggcaacggagaataaggagaaggcaaagggcgaagcaatcttccccctaacgcaggaacagatcaaccaaatagctgctatcggtgccaaggaaggtgtaagggcatacaaggaagagcagaagaaggaagagcgtaggagaaagaaggaagatagcaaagtcagaaagacaaagaaactgctcagctcatacagaagaatcaaggcgacattatcggatggagagcagttcactccggaggagcaggcagaactgagatggaagttcattgaggaccttatgggaaacacaagagagatagcaggaaagtccgagaggacaatcaaagatacggagcgcaagcgtgaagaggatttatactgcgtgttccggatagaaaaagcgaccgaaatgtaccgtgaggagtgcgaaaagagcggaagcgaagaggcgaaacgccgttatagagagttaagcatgatgtacctggacgaaaaaccttacacggtgcaggagatttcggaagtagaaaacataagtgataagaccgtctacaaggacataggaatagcttgtggcattgtggctatttacttactgggtgcggatttctaaacgctccctgtggctgtaaaacaacctggtagaaaatgagtaggttgcataaagaattaccaagtggtaatatgctaattagccgataacccaaatgtcacccctaaaaatagccagttgtatttcttcccaacggcaggcacggcgggcgaaatccctgccagttagccgaagaggaaatatgaacaatcggttaaataaggctatttcagtgtacttaggcaggtctgtatagtataattaaactataaacaaccagcataaaaggagtgattgagatggcaatttggattagcaggtatagcaataaggagttacagagtggtaagtattacccggtaggaataagcatcggaacaccgaagtttccgctggggtacacgctgagaaagcagtgttactcgctggcaccgaaaggctatatgctgaatatggagcttgacagattcaagcctgcatattacgagaaattggaaggcatcggcacagacagaatcatcgatatggtcgagaagatggatgcggaggcaagggcagaagggaaagaacttgtgcttctctgctacgaagatgtgagagttccaggagactggtgccacagaaccgtattcgctgagtggtgggcggaacagactggagaactgattaaggagttatacgatccgtcagagccgaaggtcaagaagcctgcagccaagaaagaaaacaaggaacctgtcaagaaggtagtcgaaaccaggaaggaagaacctggttacgagcagctgagtttgtttggtttggcagggatttaataataacatccggaactggtgtaagtagcacgtggctattccatagttaaggttctgttcatcgcagggttccggtccaaaaacaacggcatcgcatccgaaagggtacggtgccttatttgttatcacggaacgtacctcagtgcccttcgggtctgaggccttttttgtgcaatatgctgaggcaggtatcaaaaatccccgggtcagtaccagggaaccgcctcagcttttgtatatattgaacaatttttagggaaggagacaaggatatggcattttttatggatccgggagcaatgttcctggggtgcttaggtccgtcggagcagaagtttcttgttactctgatagagactgcagcaaagtccggatatacaaggttcgttgagccgtgtgccggtacctttgcaatggcgaacctggcagtacagaatgggtttaagccggagcagatcgagaccagcgacgtcaatatgatgtcaacagtcctcggatatgcgattactggccagtcattagagccactggaaatccatgcacaaggctttagtggcgaagagcttcttgacccggcaacagcattgtatgcgcagctgtatctcagaacctcgaagaatgcgggcaatgattatttctatcagatactcacagacctacgcctcagacgagaggaacacatcgagagtatcaatcggcagatagaggtaatcaagaatctgctcggtggcatgagctacagaccattggatatgtgggaacatctgaaagaggtgctggacgatccgcacgccttggttattgcaaacccgccgacctacttctccggatatgagaagttctacgacacacagggcaagatgacctggaaggaaccgccgtatgaactgtttgacccggagacaggacaccagcagttctacgacctctgcatggatgcgaaggcgttggttatctgctaccaggagaagagagtaggcgaagccgtaggatatacgatatacgcccgctccggcacgagagcagatttgaatgcttacatcactacgaaccgggaggaagaggcaaccgccctggcaaacggcaagaagataaagcgcccggcagagagtaagttacagccgttagactgcagtatgcttccgagagattatgtgatccaggaagatagcaaggtgcaggttatcccgattaagtcagcagaggctcagtattacagagagttatggactcacaattttgtcggttcatcggcgacgttcaacagggcattgctgattgatggctatgtggctggggtattcggcatctcgaagatggcggcagacagcgtatttgtttggtacgtgatgaaggtgccacacaagacataccgcctcggcaggctgtgttatatgctggcgcagaacagagattttgtagatacactcctggacaatatcgaacaggagaaggtcacaaagatgcgcaccgcaatgcttaccaggtacccggagaacaaagaggtacgaggcatcatgaaactggtaaacagggttgaggacaagaagaacggctacaagctcacgtatgaggctgaactagtagagggaagaaccgaacagcagacgcttcaagaatggctaaggagggaaaacgaatggcagaagaacagagcaaaggcatccagcaaatcgaaggatgcgaagtaatctatgatatgggttccggcttggtgatcgccaaggttccgctggataaggttaaagagcaggacatcaacgccaggataatgaaaaacgagatgcaggatcagttgaccgctaatatcaagaagcgaggacagctggaaagcctgcctctttttgttttggtggatggcaagctggaaatcatcagcggccaccacagagtaaagagcgcacgtgctgcagagatgaaggaaatcatcgctattgtcgatgtgtccggtctctcacgaagcaagattgcggcaaagcagctggcacacaatgcaatttccggtttcgacgacgacagtacgttgagagaaatcgtgaagatgatagacgatgtggacgatatgattgagtcattcgtcggcaaggagatcatggaagaaccgctggaacagtacgacaagatgctgagtcctgcggttcagtttgattttaagaatgtgacgtttacattcctcccgcaccaggtaaaggatatggacgcactggttaaagacctggaatcaaaggctccggacattgtgggcgtggcatcctacgagcagtgcaagggatttgtggagacacttagcaagtatcagaagtttacggacatccgaaacgtcggtgcggctatccactccatgattgagaacgccgctcagaagatggacgactgcggtttcacagaggaaggagaatggacctacctcgctaaactgtttggcagtaatgcggtaccgggtgagtccgcttccgttattcagcaggcaatcaagaaagctgagaaggaagggacaatcacgagtaagaacaggtggcaactgatcgagtacctatgtgctgactacctcagtggcaggtagttaatgtatggcagctaagccaaaatacaatgccccttaccacgataactgggcgtggtctttggctgcaatgggtgccaccaatgaagagatcgcccttgccatgggagtctccgaacgaaccattatgcgatgggccaaggaacacgaatcattcggcaaggcgcttggagaaggtaaaggcgtatcagatgcgaaggtaataaggagtctctacgagagagctaccggctatgagtacgaggaagagaagaaaatcattgagtatgacaaggacggcaatgtgaaaccggtcaagattgaaaagaccaagaagcacgtaccgccgaatgtcacggctcagatattttggttgaagaaccggcagagagaccgctggcaggatagaccacaggactatgtggatcagaccagcgacaatgatgcggaggttcagatttaccttccggataatgggagggacgattgatgaaagagaaaatcgtattagctccgcagaaaggaccgcaggaaatgtttttagcgacctctgcggatatttgcatttatggaggcgctgcaggcggaggaaaaacctttggactgctgttagagccgcttcggtacatgaacaatccggactacaacgcaactatcttccgacgtgactacacgcaggtaacatctccaggaggcttatgggatagttcacgaaagatttaccgctacgtgaaaggttcccagccgttaaagacaccaaaactacactggactttcaaaagaggcgcatcggtcaatttcgcccacctcggacgtgatgaagattgcgacgactggcagggttcacagctcacgatgataggatttgacgagctgacgcactttagcgagtaccagttcttttatatgctgtctcgaaaccgtacagattccggtgtaaagccgtatgtacgagccacctgcaacccggacgcagactcttgggttgctgagttcatttcctggtggataaaccaagagaccggctacccaataccggaacggtcgggagtgatccgctggatggtgcgactgaatgaggtcgttacctggtttgacagcagggaagaggcagtgcagggagctatcgagaacggtgtcaagccggaacaggctgagacgatgcctaagagcgtgacgttcattgcgagtacgctgcatgataacaaaattctgatgaagaatgacccagggtatttagccaacctgcaggcgatggctcttgtgcagagagagcgactactgcatggcaactggaagattaaagccgccgcaggtttgatgtttaagcgagtaaaggtaaatatgctggaagagataccgcccgatgttatcaagtgggcgagaggctgggaccttgcggcaacatctgaggatgaaaagggagacccggcatacacagcaggcgtgctgatcggaaagagaagaaacggacggtacattgtggccgacgttatcaatcgccggttgagttcgtccgatgtgagagaaattataaagcagacctgcatagccgacagggcgaaatacggaagggtagcaacaagacttccgcaggacccaggccaggcaggtaaagaccaggcacagagttttatgaagctcttggctggttttactgttaagtgcattcaagagtccggagacaaggtaacgagagcagaaccgttctcagcacaatggttaggacttgaaggcatggataaaggcaatgtcgatgtgctgattgcaccgtggaatgaagagtatttcaacgagtgtgagaacttcccgcagtccaaattcaaggatatggtggatgcaagttcgtcagcatttacggagttagagagtggtgctacatactcagcaccgcctaaggatagccagttaggcaagagcagttattggaataagtgaggtgagaacagatggctaacaaagaaatcggtcgcataggtcagcgacgctacggaggaacaatctacgaggagttccttcacgaactgagaggcacacgaggaatagaggtctaccgtgaaatgtctgagaatgacgatgtggtaggtgcgatcctcttcgctatcgagatgctggtaagacagtgcgactggaatgtagagccgggaggcgataccgcaaaggacaaagaggctgcagagttcgtagaaagctgtatgcacgatatgcaggacacttggacggacacaatttcggaaatcttatctttcctcacttacggttggagcttccacgagatcgtgtataaacgccgcatgggaaatacgaagaacccaaccacgaagagtaagtacacggatggcttgattggatggaagaaattgcctatcagagcgcaggaaacgctctaccgatgggaatacgacaacgaggacaatctgctgggaatgactcagatgccgcctccggactttggtacctacacgataccaatgagtaaggctttgctgttccgtacaaagagcaggaagaacaacccggaaggacgaagcattttgagaaatgcttaccgatcctggtacttcaagagaagaatccaggagattgaaggaatcggcattgaaagagaccttgcaggactcccggtaatgcacggaccggaagggttagacctttggaacgatgatattgaggacaacaagcagacacgaattgcgttggaaaatatggtaaagagtattcgccgagacgagatggaaggtgtggtacttccggcaggatatgagttggagctgttaagttccggcggcacccgacagtttgacacgaatgcgatcatcaaccgctacgatacccgaattgcaatgacggtactggcggattttattttcttagggcattcagagaccggttcctgggcgttgagttccgataagacggagttgttcgctatggcaatcggtgcattcctagacatgatctgcgagacattcaacagccagggcatcccgccgttgatcgatattaacggtgaacattttgcaggcatcacggagtacccaaagatgtcccacggcgacattgcagatgtggatgtaacgaaggttgcagcattcatcaaggatatgaccggcatcggaatcctggtaccggacgacggactggaagattacattcgccaggtcggacacctgccggagagaacaacggacgacaggacgatagaccagcggcgtaagcaacaggcggagcagaaccagccaccggagcctgagacagccgcaggaagcgatggaaacgacgaaggcgaagaaatccccgacaatgtggcggaagccgctaaaaggcgattaggaaggagcggtgcaaatggcaataaggttcatacggccaaagcgaatacgcaaggcaaagacaccgggcagtcaagaagtcctacgcagacttgaagagtacctgcagaacgaatgtgacgaaccggttgaaatcctatgcgggttttggcaggatcagcaggatgccatcacgtaccaggaactccgaaaggcagtagcggacggaagcctcagcaaagagacattagaggcttggcaacaggattactcagtgcttgttgccgagagattacagtcaatgtggacgcaggcaatagcagcgggaccaaccgggcaaccaatcctggacggtctcgcttttgagtttaacactcagacacctggcgttctcgactggatcagtgaaagaggagctgagtttgttacccgatgcacagaagaacagaaggacgcaatagcggcactcctggaaaagaaaatgagagagaaccatacagtagatgaactggcaaggctcattcgtccatgcatcggtctgacagagggtgacgcaagagcaaacgccaggtattatgacaatatcgtggctacgatgcgaaaagagcatccgagaatgaagattgagagcatccgccggaaggcattggacgcttctcagaaatatgcagagaaacagcaccgggccagggcattcacaatcgctcagaccgagagtgcttttgcttataaccgtggagccgatgaaggcatacgccaggcacagggcgaagggtatcttggaacgatggtaaagagatggagcacatccggagacgattcggtgtgcgacatctgcaatgcgctggaaggtactgaggtagatatggactccgactttgatttcaaaggaaaggttctgtttgcaggacaacatatgttaccacctgcacacccgagatgtgcctgcgctatcgagtatatcgaagtggctgcaccgagaggaaggaagtgagaaagtgaagaagttctctgatttcatcaagaagtctgcagaaccgcagaagaaagagcctgccagcaatgtgattaaaggcaggtttaagattgccaagtccgacgacgacaagcacctggcatttggctgggcgaatgtggctatccgtgctgacggagaagagattgaggactggcaggaggacatcatcgagccggaagaattggaaaacgcagcatatcagtacgtgttgctctatcgtgaaggtggagaaatgcacgaaagaggcggcgctgcagtcctggttgaatccgtggtattcacggaagagaaaatgcaggcaatgggaatcccggcaggaacccttccaattggttggtggatcggcttcaaagtaaccgacgaggatgtatgggaaaaggttaaggatggcacatatccgatgttctcaatcgaaggagaagccgagagaatcgaagtagaagatgaaaacaccttgtagaaatgggggcgtattgagtttttcagcagcctcaaccttataattccacatacgagagtgtaataagggcataggtagttcaatttattccgttattaggagaggcaccgcaaaggtgtcttttttaatatacaaatcttgcggaaaggaggaagcaaagtggcaacaaagttaaaaaatctcagaatcagcaaggttgattttgtagatgaaggtgcaaatccggatgctcacattaagctgacaaagagcaaaagcgaaaaggggcagtccacaggagagaatggcgataagaatggttttgtcagccgattgttcggtttcatcggcaaaaaggccggcatgaaccaggaagagatcgacagtgcagtagaggaagttctgaaaggcaactctgttagtttcaacgagcgtttcaatgaaatcaagaacagaaagattgctgatgaaatttgggatatatgctacgcactgcaggcaagcctctgttcgattctgaatgacgaggagctggatagcaccggcgcagcaacagcgatgaatgagagccttgacgagttcactgcagtagtgaaggaagcgattagcaactggtccggcggaaaggtaatcaacatcgtaaagagtgacgaggtgacggagagtgacctggcaatgatgaagtctgcggctgcaaggctgaatgacaacatcgagaaggcacagactgccgccggtaagcctgccgaagaaggagacgatccggaggtagacacagaggacaaaaaggaccagggcaaaaagaaacagtcgaaaggagacaacgaagatatgaagatcgacaagagcaaaatgacccaggctgagcttctcattctcgaagatattgagaagagatacggcgtggcagacgacccggctcagacagagcagactccggagggaaaacctgcggtaacaaagtctgttgagaagcctgagcagaaccaggaaacacctgcagatggcgaggacatctacaagggtctcaatcctgctgttaaggcagagatcgaagcactcagaaagttccgcgaggatgctgagaacagagaacttgaagccgtagcaggcaagtatgaaatcatcggcaagaagaaagaggagcttatacctatgctcaaatctctcagagctaccggcggaactgcatacaacgatatgatcgccgttcttgatgccaccgtggaagcggtcaacaagtccggcgttttttctgaggttggcaagtccggtcacggctctgtgcatgtaagtgatgcagagggcaagattgagggtatcgccaagagctatatgcagaaagagccttccatgagctacacagatgcgctggctaaggcttgggaagataacccggaccttatggacgcatacgacgctgaggaaggattttaaggaaggaggaaaagaccatggcaaagagaaacttcaacggctcacagattaaccagtctgtgacaatcgcagagcaggccggtgctgctatcgacgatgtgagaaacctcattctcaaatatgacgagaatggagatgtagtcgtagcaaccgacggcacagcacctatcgtaggcattgcaattattgaggcaggctataacgacatctccggagcagagtccggaaaggttgcaaagggcgaccaggtagatgttcagattaaggacatcggctacattcttgctggcggagccatcaagaagggcgaagaggtaactgcaaccgcaggaaaagcaacaaaggcagctgacggagattatgtgatcggcgtggcgctcagcaatgcagctgagaatgactatgttagagttcagattttcaagtatcagaagaacgccgcaaaataaagaaggaggaaatggtaaatgaaaagaacaacgaaaagcatccaggcagaaatcgcaaagggtgcatttagaccgcacacagcgctttcaacaatggcgctggcttactatcagcaggaaacaacatcttttgcaaagaatatgtttcctgtttgcccggtgcagctgtcctctgacaattactatgtatttgacaaagaggatttgttacgtgataactggaatagaaaaccggcatacggttcagttgacccggcagtaatctcagagcatacagagaactatgcctgccacgtagatcagatgatgatgggtattgataatatccgtcagacagaccttaaccgcagacagggacctcacaccaaagacccacgccagcagagaactaaggtgattgcaacacaggcaaatatccaccaggatgcagagttttcaaaatctttcatgcgcaaaggagtatggaaaaacgaggcaacaggcaccgattccgtgtctgttacatccggacagtttatcaagttcagcaacggaaacagtgacccgatcgctttcttccagaacaaaatgactgagatcaatgaggaaaccggccgcacccctaacagacttggattgggtgtaaacgtctacaatgcgttaaaagagcacccggcaatcctcgagagggtaaaatacggcggttctactcctaacccggcaaaagtaaatcttaacgtactggcacagctctttgaaattgacagaattgtcctcgacagaactgttcagaacaaagctggattaggacagaatgcagatatgggatatatcggggatccgaactcattcctgttagcatatgcgacagacacaccttccgtcgaggagccttctgcaggttacatcttcacatgggatatgctggagaatggaattttgcttccgattctgaattatcctggcgcaccgggaacacattcagagctcgttgagggccttatggcatacgacatgaagaaaaccgcagatgatctcgcattcttcggttgcgacgctgtataaggaggttcgccatgaaattgattgcaaagaaacgctgcagttatggcggcagaaaattcttcgcaggggatgaaatcccggcagacattgtgttaaatgtcgagagggaagaaaaactcggcgtaatctcaatcgcaaatgacgaagcaggggtaccggaacagtccggtgccctttattcgcaggagcaggtagacaagatgatggccgatgcagtcgccaatgcaagcaaaggatttacgcaggagcaggtggacgagatgattcagtccgcagtcgcagagcttaaaccgttcgactccgacaatgccggttttgccgtgacagtcaagggcgagggtgacaatgtgacggcggtttcctgcagtgcagaggatattcagtctgtggtcgatgtactgcagatgaatgcggacgatggtgcaaaggcagtagccaacgtacagtccgacagcgttctgattttgcttcacgccttagacacacgcgctacggtcaagaaagcggctcagaaacagcacgacactttattctccgctgacggcaattcaaacaaatccgtaggcggtaacgcaaccacagacagcattacggagggagctgatacctaatgtcaaaaggtgcatacacatatgagccgggaaacatcacggagtttggcaaagaccgtatgaggtttgaacttggagacacgatggtagagggcctggcagatacgacggcattgaccgacgaggagatacaagcagcaatcgacgcatacccgaataagtggaagcgtgcgaagctgatgcttcttgaaagtttgtgccgtcgttttgcgtatgaggtcaacacaaagaccggtcctctcagcctggatatgaatggcagggcgaaactttggaaagaagattacgacaagctgaaaaaagaggtccaggcagaatcagtgtcagtgccacggttcggaaatggggtagatggtccgccttacttccataccggaatgcacgaaaacgagagggtgtggaacggatgataaatgcgagatttatgtatttaaggccgggaaacttattcaaggattttgttgtcgagtcaaatacgcaggttgtaacagcgagcggaagggtagcaaacgacccgaaaggaaacggctcaaagatcgtcagaggatgtcttgctgagtccacgaaggaacagaaggaatctcattcaacgagagaccgtgtttgcacccatacgattgtgcaggcaggtagtccggaagcaaagaagtccgataaactcatactcggaaatcgcacgttttacatcatcgacctggacgaggtaggtagcttgggtatatccacaatctactatgccgaagaaaggaaggatgtcaagtgaaactatggaacgatggaaaagcagggagtgcaggaagtgccataagggcaacagtcaaagggcaggtagccaaaatcaaccggcaagtcgtagccaggggcgttagggcagtgaatgccatgaggaacgcagagctggaagtgctaaaaggtcagaggagcgggcgaacatatcgcaaaccgcacagcaaagcgacctacacagcttcggcaccaggagaaccaccggcaagacgtacaggaaatctccgtatgcactggaatggccaggtaaagagcgaaggcagtaccgctggtggcggagtccaaatcattgcagagctggaaagtcaagagaagtttgctggctaccttgaaaacggaacgaagaaaatggcagcaaggccattcgtagacaagatcaaggagaaggcaaccccggaaattgagaaaatttacaaggagccgtatggctaaggaggcatgatatatggcactggtagtagaacagccgatagcaaccttcgatttgagcgagattgccaggggcgatttggtctatggcaagcatcgcacatggccggaaggtaaagccggatttgtaacatcagccaccgagaaggagctgatcgtccagtatcatccgggtatcggcaatgtaactaatcactttcggattcccattgatgaagcggtagacgctcagtgggaaatccgatattcacacgatatgtcggaggtcaagacctacggcatcgaaaagcaggacactgaggaaggagtgacagagtgaagctggaagaactgattcagaaaaggttcgtcagtacggtagcactcgcagagaggcttacaacctacaacggtgtgcctgctgtttttagtccggaagcaccgggcgacgaacaggatgggtggggcggtgagacgcagtaccctatggtaacttacaactacgacctgcaggcaaacgaagaacgaaacagcgccggtagtctttcggtttcaatactctgtcagaatacgacagatgtattcccggaggacatggcgcctatcgtgaaggaatgcctgcgtgatgtgatccttcttccggaaggcggtacaccgtactgcttcacctgggcgagaacagatgcgttcactatgggcgaggatgcaggaaaagccggtgttgtaatcggctgtgaagtcagattcgacatcctggaatatccgtctatggaaacgtccgatccagacccagtaatggcggtcgataagtacatcaaggagttgtacccggaatgcctggtaatggggtatgaccggatggaggaaataaccgaagcctcagcggatcggccagtggtttactgcagactgatttcaactgagaaacaggaagaaacgaatacagtagcttggatggacggtagaattgccgtccatgttttatgtccggaaagcacagtgagattgaaaatagccgcagatattgccaaccatttgtcactcgacggagaggtaattatgctggactattcgcctatgttcattaagagactgcaggtgaattacaaatctgactacttgaaggaaggccaggtattcatcacaggtcactatggattgcttaggtacaaggctaagcctcatgtgcttatggcagctcatggaaattacagttaaggaggtaaagcatggctaaggaaacagcaactccggcacctgctgaaacaaaggcagaaaagaagccggagaaaaaggcccctgcagagtccgtttacacagtaagcgagcttgcaggcaacgcaagaagcgtattcggcacaatgcaggaatgtgttgtagccgctctgaaaactgacggcaaagccgagtacacagtatcagaggcaaaggaaattgtaagtaagttcttacagaaggaggttaagtagaaatggcaggaacattcattttaggcgaaactaaggtgcgtcctggtacctatttcaacattcagaagaaaggcggaaatgccgccgctggtgttatgaatggcgttaccgcagtaatcttccgtgcagatttcggtcctctcaacgaggcaatcgaattatctgcagaggatggctacgaaggaacattcggtaccgcacttactacggacgcaatgaaggaggcaatcgctggcggcgcaaagacgatcatcgcctgcagagtcggtaacggcggcactcagggcagtatcaagttgcaggacagcgacagcacggatgcagtaagcatcacagccaaatatcccggagcaaaggactttgtagtaacagtccgtgagaagctctcagacagcactctcaaagagtgcattttttatgccggtacaacagagtttgagaaggtagaatttgccgccggaacagacgaagctaatgcccttgtggatgcgctggcatcttccaagaatttcaaggcagaggttatcaagtccggcaccgtaacattacaaaacgtgtctcagtcccagtttacaaagggaactgatccgcaggtaacgaatggggactactccaatgcgtttaagcaggtagaggcgtatgagtttaacacaatctgcgtcgataccgaggacacttcggtgcatctgcttctgcagagcttcatcaatcgtatttttgatgcggcatcccttacacaggcggtcgttgctgagaagcacacggtagacctggaaacaagggaagcacacgccgcttcattcaacgacgagaagatgcactacgtccttaatgcccatgtgaatgagcagggtacggagatcgacggttatcagactgcagcacgtattgctggtatgatcggcgcagtagcggcaaactcttcgctcactcatacagtagtcagcggcttctccgagatcaaggaaaagctgacaaacactgaaatgattgctgcagagaagaaaggctgcctggtactcagctataacaaggctaagcaggtgtggattgataatgcgatcaacaccctcattacgccgaaggacaaccaggacgacggctggaaaaagattcgccgtgttaagactcgtttcgagcttatcagacgtatcaataccacctctgacaacctggtaggcaaggtagacaacgacaccaacggtcgggcaactgtaatttctcagctgcaggcagtcggtgatgcaatgagagaggaaggcaagctggtagcctgcacagtaagcgagagttccgcttacacagcagacggtgactccgcatggttcgacatcgatgtaatcgacaaggattctatggagcatatctacctcagctttattttccgtttcagcaccaatgagtagaaggaggtaaaaagcgatgattagaaacgagagagccgccggtgactcaagacacgcacgtaccggtaaggatggagcgttctacagtgaggacggcgttttacttgcgacagttgatacgttcacatctaacgtgaactacaacaacgccaagtacagtgtgcttggagacgcacaggaacacgagacagccaacacatttgctgtcagcctcacgatgtctcagatcgtagtagaggacgaccagttctttgtagaggtcatggaggcattagagactcagatcccgccgcactggaacttccagggttcacttctcggacgtaatggttcagaggagcgtgtggtttacaaggagtgtatcccttccggacagatcgacattcagaatgtcactgtcggcgatgttatcaagagaaactggaacttctttgtcaacagaccgcctaagttacagtcattactcggtgtagacagataagaggtaccacataagaaaccagtaggggagccggagcggttcccctttatttaatcaaaaagaattggaggacattcaaatggctaaagaatttgtaaaaggcgtaacagtaggcgaggcaacagctgaggagaatactcagcctgcagtaagcacagtggagacaaacgaagaggaaacaaagcaggtaatcagagcgaatgaggaggacttcatcgcaggtctgattgcggctgcagacttcgcttccgatgaagaggaaacacagaggattgagattgtcagaaacggcaagctcgcttttgcattctctatcagacctctcggctcagaggagtacgacaagtgccgtaagaaatttacaaagtatgttcgtaataagcagcttggtatcaagatgccggaggacacagaccgtatcaagtaccagtcagcaatcatccacaaggcgactatcgcagaggatagagagaagttatgggacaacaagaaggtatggcaggcgcttgaaagcaaaggatttcagattatgtccggcctggatgtaatcgagtacacacttaaagctggcgagaaagaccgcattattgatgcgatcgacaccctcagcggctacgagagcaacattgaggaagtagcaaaaaactaattgaagcggggggcaagatgcgcttgctgcatcacatattccaaaagacaggaataacccccgatgaattttacgagaaaccgaaaggcgtgcaggcgttcatgcttgcgtctatgcggataaccctagaatcacagaaaggaggtaatgacggtggcggaaacacttagaatcgaaattcctattgagacggtcgataataccgatccgggagtctccaacgctacgaagaaattcgagaagatggaacgagcggccaatagtgcgaatagttcagccaagaaagcgagcgacacagtttccaagtttgacaagcaagctcaaaaaaccgaaaagagcctggcaagctgggcgaaagaaaagtacgaagtcctgcttgaagcgaaggaacgggtcagtccggtactctctacgctgggtaatgggttaaggggttttgcagggaaaacatggaacgttacaatgcgagcgattgacctcataacctccccggttcgagggatcataaacctgttgaagaatccgatcttccaagtcggagcggtcctgggagtcagtatcggtctgaaagacacgatagagacatacaaggacttcgaggccgcaatgtcacaggtccaggctataagcggagccaccagcacagagcttgtcaaactgacgaataaggcgaaggaaatgggtacaaccacgaaattcacagccgaagagtcagcgcaggcgtttaactacatggcaatggctggatggaaaaccgacgatatgctgaacggtatcgaaggcattctcagcttggcggcagcttccggagaagatttggcaacgacatccgatattgttacggatgcgcttacggcgttcaatatgaaagccggtgatgccggacacttctcagatgtattggcagcggctgcatcaaatgcgaacacgacagtctccggaatgggcgagactttcaaatatgcaggttctatggcaggatcgctcagttactccatagaagatgttgcccttatgacaggcttaatggcaaatactggaattaagggaacaatggctggtacggcactcaactcaatatttacgagattatcgacgaacaccaatggagcggctgatgctatgaaagacttaggcatcagcttttttgattccaacggacaggccagggatttatctgatgtgatgggtgagttaaggacggctacggcaggtatgacggctgagcagaagtcaaacctggcaaatacaatcgcaggaacacaggcacagaaaggtttacttgctatcttgaacgcctcggaagaggactacaataagttggcagatgccatcaacaatgcagacggagcagcagcgaatatgtctgaaacgatgatggataacctgcagggttctatcacattgctgcagagcgcagtagacggagtgaaaatctcatttggcgagaggttatctccatacgtgagaagcctggcagattggcttaccgatcagatgccagcggttgaatccggtcttgatgaaatgatggactgggtagatacaaaggtggaccgcatgaagaagaaattccatgacttaacagagtcagaagaatggaaaaacgcagatttcctcggcaaggtgaaactgagctgggatgaatttattgctgatccgttcaaggagtggtgggacaccaaaggaaaggcaaaatttgctgatttcgccggagacatcggaaaaggcatcggtagcggaattaagatcggcgttatgacaatgctaggtattgacatctcggaaacattcgacgagggaaccagcatcggagcgtcgttcgctaaaggattctcagaaggatttgatttcgatgccgtgtctgcgaagttgatggatggactcggtaatttagtatcaaatgcgggcaaactgcttccgggcggtaagtctgcagatttgtcgtctgtattctcagcggtattgctcggtaagattgccagtccgtttattagtcttggcaagggagcaatcagcctggggaaagcaggaaagacagtattaggttcgggaaccggagagatgggacttggggcagcaatgctcggttcgtccgcaatgggtaccggacttctcggaaagtcagcaatgctggcaatcaacctcggagcaggaaacctggccgggggagcatcgctaagcgcaggagctttatctgcagtcggaatgggtgcaggagcaggagcgattgccggtggtgcaacgctcgtaagtagcgcaatggatttgtataaatctatcaagtccgacaataaggacgagaaagccgcttacggtggttcagccgcttggaaagcaggcggcgtagcagctggtgcggcggcaggtgcagcacttggttctgtaattcctggtcttggtacagcggtcggtgctttaatcggtgccggtgtcggaggtatcgcaggatggatcaagggcaataaggtcaaagaagagtaccaggataatgtcgaagaaatgcagaaggaagccgagaaagctcaaaaaattttccaggcaaccggtttgtcaatcgaagatgtgcgatttcagaataaggcgctgcaggatgctatgaacgatagcgaggtttctgcggagcagttttcagctatgttccaggaagagtgcgaaaacgtggcaaagaatgctttcggaaaggttaagttatccctggaagaggtcaagagtattgcgagtgatattacattcggtgatatgacggacggactgaacaccttcacaactgcaaccagcgacacacagcaggcacttagcgacctgcaatcatcagtatcgaccttgaaaaaggagaactggaaagtcagcttaggaatgaaactggacgaactgcagaaggacgattacaagagcgcaatcgaaaacttcatcagcgatagccagtcctatattgacaacaaccattacgaggctacagtcgctttgaagctgcttactggaaccgacgcagataccagtggtctcgacagctactacggcagcatgaagaaacagctggacgatttgggaaaagaactcagtggaaaagtggatattgccttagaggatagtgttatcagtcttgacgagtctgcagaaattcagagcttgcaggatcagatttctgctatcacaggaaagatttcgcaggccaggacggatgcggaatttgacacattaaagattaagtattccggcgcagagctggatatggatagtttcaatgctttgcaggaagagctgcagacgcaggtaagcaatgcgtcggatcagtacgagcaggcgcttacgctcacgctcacaaatctgaacctgcagctggcagacggagctatcacgcaggaagagtacgatgcggccgtaaaagaggcaaccgatggctattacgcccagctgaatgagattaacgcaagagtatcttcgttcaacctggaaacgattgccgaggcgtgggactcctcacttcaaggctatatgccggagattgagggaagcacaaaggagaagctggaaacagctttgaacaatgcgttgctggcacacccggacgtacagacttggactgcagctgatgtgacaagctggatgggattagacaagctcaatctcgatacagcagttcagacggacattgcgactcagattttgcagacggcacttgcggtaccggatggtaccaaagagaagattatgcaggatttcaaagattctgtaccgactgcagaggaaatcaaggaagcaatcgactgggattcaatgactaatgaggactggacggaactcatggagtccatcacaggtccgacagaaggcgagtcaatcggcttgaatacagaggatctgaaaaagaagatgtcggactactatggtgagtatttcgagagtgtcaagacgtcctactcagaagcgcttcacaatgccttggagaacagcggcagcgaagaaacactcagcacattcatgcaacagtatatgcaggatcagatggccgattttgatttttcaacggtcatggagaattacggtcctatctcgaacgagtattttgctacactgcagtcagagtggcagacagccggcacaaaccttggaacgtctctcaacacgggagcgtcaacgagtcttaccaatggctcggcaggattgagaaccagtctgcagacctctctcaatacagcaacggcaagtccgttcagcatcagtccgacggtaaacgtaacaccgaagtacaacctgctgacgctgccgacaattccaacaacgacatccacaccggctaaacacgctgcgggtggccgagttggtggcggtcctcagctgtcatggttggcagaggaaggttgggacgagtttgttatccctacaaacccaagccggaggacaagagcgcttgaattatatgagcaggcaggcgaagcactcggcgttcctaaacacgcagagggcggtcgtatagaaggctcaaatttgagcgatatggtatcagaccataatttattcactgaggcgacaagaaacacatcctatggctataacgacaccacagaaggtaattatgaggacaactcagcagaaacatttgctccggtaagttcagaggttccggcctctacaccacagaccggtccgatcagtgtaaatgttgcagttagtccgaatttccaaattgaggcgaaggaaggtcagagtgaggaagatattgttgccgtaatcagaaggcacttaggcgaaattgcagatgaactcggcggaaacatcgccgacaagttaagcgaagtattcgccaatatgccggtaacaagcacgaaaggagcgtaggcgatggatattaaactgattccggtggaaaagggttcaaagtttacgttcccggctctacccgaaaaggtgcagggcaaatatgcagccaagtaccaaagttttgacatcatctccctgggtaccgtaaaggtacctaaggggacggatgtttcagagttttcgtgggacggtgtattttttggagcatcaaagaagaatgaggcaatcgtcaagacgaatgcctggaaaagtccaaatgagtgtgtaaaaattctgaatgactatatgttgaatgagacagtgcttacattgatcgtaacggaaacgtggataaacgtggatgttacgatttcttcatttcagccgagaccggttggagcgtatggcaatgtcgagtattccattacgtttgttcagaagaaaccgctgaaaatctacagtacaaatgaactgaaaattgcggcgtttgtaaggaaaacgaagccgagagccagttcatcatcgagcggaggcaattatacagtagtctccggagatacgctgtggggcatcgcttcaaagaaactgggaagcggtaccaagtggacgacaatttacgatgcaaacaaggatacgatagagtccacagcaaagaaacacggaaagagcagttcagatcacggtcactggatatggccaggagaagttctgacaatcccaggataggaggcgcactatgattgatttggcgaaaatccagtaccgggtcgtggttatggacgaaagtaagaaccagtacaacatcaaggagtacatcgaaaacctcggatgggaagagaacgacggcgagttatccgtcagaacctcatttgtggcgaagaatgataagacatccaagggttacctgtcgaagataatcaagccggggtgcctggtcggagtattcgcaacagacggtgcttcccaggacgaggaagtagcacgagggtacgtggaaacgtggaatccggttgaaaagagcggaggacatacgctgaaatgtacctgctacgacgagctttacaagctgcagaagagccaggacaacagatatttcccttccggaaccggcacaaagtcggcgatagaagggattcttgatgattgggagataccgcagggatcatatcaaggcccgaatgcctcacacggcaaaacggtggagaacaataagtatctgtcagacatcatcatcaatttgctggacgatgcagcaaaaaaaggcgaagagcagtgctttgtgcaggccaggaaaggtaagacatccgttattccgagaggaagcaataagacggtgtatgtattccggacagataacacgcagatgttcagtcagagcataagcacagcagatatgattactagggtcaaggttgtagggaaggcagacgatgatggaagaaccagtgttgaagccacggtaaacggcgagacaaagtatggtatccgtcagagaatttatacgagaggtaaagatgaaagccttgcggacgccaaatctgcagcacaggaaatcttagacgacgaaggaaaaatcaagaaggagatcaaagtacaatctccggatattccatttgtcagaaaaggagaccttgtgtatgtaatgagcgagctggctcagtcgtattactacgtgaagggcatccagcacacggcagacacctacagcatgacgatggatttggagcttgcagaaccaaagaaggaaaaggcaagctccgagaaaaagaaagattacaatgtgggtgacatcgtgaatttccacggtggaacccattatgtgagcagctacccaggctcaaaaggctacaaggccagggccggaaaagcaaagattacgattaagaacggctccggaaaagcgcacccttggcatctgatccacacggatagcggaagcaatgtgtatgggtgggttgacgacggaacctttgattaaaggcaggtgatacagatggatcaatttgacggacacccagggacagcgaaactggcgcaggtgttagataagagaacctcgcagaaaacagagtctccgctgactttagattttggagaaatccaggcaaacggaagtttgaaaacgaacacattcccggtgccgatcccgaagggagactacacgatctgcagactggctgcaggattgacactttcaacctcggaacagagctggcttggcaaatcgccgtcgggcgttcctcttcatagccacagtgtaacggtacccgcagtgaaagcgggagatcgagtgctggttgcctggattcagagcgaagcagtcgtaattgatgtgatcgagaaatcataaaggaggcgaggcaaatgtcacagccactatttccggttgttgaggtaccggattttatctcggagaacagccagtacgacactcagtacaaaaggagtatgaagtgggacccggaactgggagacttcgtgagagatggggcgcaccggattaaggaatgcgatggcaaagaagccttcgccatttggtgttttaagattgcacagacagaacggtaccgctgtttggcgtaccccgattcaatcggtaccgaaatggagcgtgccatggataacgacgatgaaaaaactgttgagtccatggtggaaagaacaatcacagatgcaattatggtaaatccccgggcagaaaatgtccgggattttcaatttacctgggaaggcgatcagatgcacgtaaccttcaaggtaaagggtagcaactgggatgaagaaatagagattagcttgtaaaggaggtggagagtatgcagccggaatttaacagaccggagttcctggaaggaaactcggcagaggaaattcacgagcgaatgatgaataacctgccggacgacatcgacgatatgccgggtgggtttccgtatgatatgacgatgcctgcagcattggaaaaagacgaaattatcaatttccatatcgtaagggcattgatgattgcgttcccggaatacgcctgggatgaatggttagaccttcacggtcgccaggtacatctcacaagacacgaagcggaaccagcttttggctatgtgaaaatcacagctgcagaaggaaccgagattttatccggaacggtattctgtacggcggcaaccgaaaccggcccgtcgattgagtatgccaccacagaggatgtggttgttggaggcgaaggatcggtgcttataccggtatcagcggttgaagcaggcacaggttctaatgtagcggcgaatacggtcgtgctgatgatggtacccgataagaatgtgaccgagattaacaatccggagcctattcgtggcggtactgaaagagagacagacgatgatttttacgacaggatcgctgcagagtacgacaacagcatgacatacctggggaacgatacggactataagagatgggcgaaacaggcgggagcaggagatgcaatagttatttctacgtggaacggtcccggtacagtgaaactggtgctggtagacggaaacggaaaaccggccaatgcgaagctagtgcaggatgtgtataactacatcgtttctccgaatgataggtcagcaagattgcttcctactggaacagcagaactgacttgtgcggcagccacaacggttgccgtaaattatgttattgcaggactcagctacgatgaaacaaccggcatcgagcaaattaaggcagactttacggaagccgtgagagcggtctatgcacaggcgaaaaccgaaggagttctaaggtacaacgatgtaagaccgttgatttctgcaatcgcaggagtcgaggactttgaaacattcacgatgaatgggaaaatgcagaacatcactctgaaaagcgaggagtacccggacaccggtacccttaattttagttaggggggtgtgaatgtggaaaagtttgatttagagaatttcccggtcagcgagagtgcaaagaacatgattgcctcagtttcagatggcttttacgacaattcctatgtcggaaagtggctgtatgaggtcatgggccaggaatacgacacggcaagagaaatagctgaggatattctgaaccagctgtttccggaaactgccacatggggactgatgtaccacgagattaagtggggactgccagtgcgagaaaatcttccatacgaggagaggcgacagctgatttaccggaagagagactaccgggcgccaatgacaccgtatcggatggaagggtacttaaaaaccgccaccggatttgatgtacgaattgcagacataaatgatccgggagattatggtttcgtggcaccacacccgaatgtgttcaaagcatatttcatgggcgagggaacacttgcgtcgaagcgggcgagagccatgctgaatgagctgaaacagtcacacacgatgtttacaatgaatgaccgaaccgagatcgtatcagacaatcggaacttagaggagatgaatctgaaaaaggtaatcttccatatcgcagagtcgttttggtatagcgatctgctggatggaagaaaactgctggacggttccagccttctttatccgtatatgagatacaatctgatgcttgggtttaagtatatgctcggtggatttacaacaccgacagacgcagacctgcagaaggtaaaattcagagcagaacagaaaacagaaaatgatgtcaaggcaggagcaatccggatcgcctcggacatcattttttggaatacgcacctattggatggttcgtgggatttggacggctcacacaggcttgatgttacacgaggctatcaactgggcgttgcaatcgttgcaatggttgcctgcgcctacaacaaggtcacagactcaatgaaagtaagaagtacatacggcttacggtcaagttcggatgccagggcggcgattcgttcggagtttgaggctgatttttggaacactgtctatttggacggaaagctgctactcgacggcaacgctatgttggagcgcagaggcggcaataaacgacttgaagctgcagttacgcatcacatgggaatcgaaagagaagatatggatgtggaggcacaggtcattaccaaaacaaggaattactggtttcttgatggcagcaatgcgctggacggaaagaagaaccttaattcaatctatagaaaggagtatatccaatgagtacagaaaagagcaaaaacgtggtggtcacgaagaaagctagggagaacctggttaaggcacgtgccggagccattacgcttccgaagattatcggtatggcgtttggcgaaggcggtgtaagcagttccggtacggtcattgcaccgacggaatctcagtctaagctcaataaggaattgttccgcaaagccattgatggttacacattcccgaatgacacaacctgcagatacgaatgtacccttgcagagagtgaacttgctggaaaagagatcagcgaaatcggattgtatgacaccaatggcgacattgtgtgcatcaagacctttaccaggaagggcaaggatgatgatgtagagcagacatacgtgcttgacgacatcttctaagccaggaaggaggcaaaacgtgaaagattacacagtaaaaagcgagactgcggtattctctgacactatgaagattaccgaaacgacagactcgaaccatgcgagcaatatcaatgcaggacctatgtgtgcatttgaaaatactattgcaaatcgcagggacatcacaaatattcaaaatgctaaagcgcagctggcgttcgatgaatcggacggcggcttaaatattatcatcaaggagggttaaaaatgtctgacaatgtaatcaatattccgagagaatcgacgatgaaagctctcatggaaatgcagaaaatggctgtggcaggtggtgcaaaccctggtgcagccgacctttgctataagtacatggttgcacagtgtaccagcaaagagcaggttgacaatcttttcatcgaatggtggaaatcacagtacgacgcaagcaaattcacaaaggtagaaatgctggaaagatggttcggcagagtcctcgaggacgacagagtgcatggtgtctcattcccactgttcgcaaccagctctacagccatcggagaattaacggacgacagcgttggcttgaaatgcgttccatctactgcaaagacgcaggggcaggatgattttgcacatcttcctcagttttggtgcctggaagtatctgcagagaagaaaacagacggaagccacgagattttctatgttgagcatatcgatgatattaaagacgttcgctccggcgaacatctttgctgggtattacagaaaaatacctacacgaaagagtgggacgaggacggataccgttacttaaaaatgaaatgccaccagtcaaccggttacgaattatggccggaaggaagagatcgcaccggtagagtttatgcgtatgcagcgagacctaagtattacgcaggaatcggcgcaagtgggaaaattacctgcggaaccggcttagctccggtaaactggacttctcatactgcaggtgttaccaaatggagagacagaggaacacagtatagtggagcgagcggaaagacgatcaagttccttgaccgtatgatgcgtcttaaatatgcaagaaaaggcaactccggaacaatcgaaggctgctctagttataactaccagtacacggctgcatattctgaggaaggcgttgaaagagtccttttgacacccgagcaggcggcaaatttatttgttggaagtagtgttcagatcggcattcagagtggcacagatagaaatactgcgagcaactattccgtctgcagaaacaagctcattactgcaatcaaggacgttgaaatcggcggtaccacatactctgcagtttatgtggataacggtggtaccacattcgacacaacagccggaagcacatatttaagcaccgatccttactggtccggttggaatgatgatgtacttggaactgacggaagcaagtacaattacaccaacggaaaagagccgggtatgctgcagaaaatcgagtttatgaacggctcatatttaatcattagcgatgaattatggcagtggagcaccgatgaaaacggagactataactttgactgctttgtttgcgaagatcagtccaaagtaagcggaacagcaattaccgagaactacaaaaagctgacagccttaacgatggtcattccgaaaggcacaacaggaaagtggacttacatcgaagataccgccatttcagatgttgagtggcctcttggtatcgacgcaagcggtagcggcgtcggctgtaaggctggcttctactgctatcccgccgcgtccggggtccgcgccggttggtgctggggcaccttgaacggcggtggcgatgcgggtctcgcgtgccgtagctcgggcgcttccgttggcgatgcgcactggagcggctctgtcggttcacctggactggctgggtaaagcagggtgaattgcctgtaaggcaagaggggcggcaggccccactaagatattaactgttgcaagagttaataaaatgggttgtatggtgtgacagaggctggcttcaactgcaatcccgccgcgtccggggtccgcgccggttggtgctggggcaacttgaacaacggtggcaatgcgggtctcgcgtgccgtaactcgaacaattccgttggcgatgcgaactggaacggctctgtcggttcaactggttagagagtatatcattcattgcaccatacagcacacgcttatgtgcgaaaattatttgaaaccagcggcggctagtagcgaaagcgaacgtcgccggtaataaccagatgatatacacgaaaggaaagcaattatgaaaacatactgcaaacctgcgaaggtagatgtggaaaacacagaatttaatatacctgcagttcgcaaggcatttgatgggaagtacaaaagaagagattttcagagattgcttctgaacacaggcctggtgaccgaacaggaacttgcgcaagagttccttgacggtacaaagcaaaaaatatacacagctacggatgcaatagcagaagaattaacacagcgcatcagaaacagagatttgaaattgcgcccaattcgccagttccagcgagaagatggattgactcataagctcagaaatatatgccaggaatatccggatcagcagataatggaatacatagcggtttactcattagaggaattgttccatgcgaagttactgccgattcaatacggaagcattccaggaagagggcagctggcaggcaaacggaaaatcgaaaggattttaaggcgtaagtttaccggaaggctggatgtggtcaagtgtgatattcacaaggcatatccgtccgtaacggtagagtgtgttatgaacttgctaaaaagagatattggcaagaataaagttttaatttggtacctgggtgctcttatggaaaattacccaggagagcatctttgtataggcgggtatcttccgtcgtggctctttaactatgttatgagctatgttttgagatacctgttgagcctgagtcagtcaagaagaggggcacagaccaaaatggtaaaagctatcgtttgctatgcagacgattttacagtttatggctacttctcacagctgacgaaagcgctcaaaaaagctacgagatggagtaaatcaacgctgggattggacgtaaagccggcctggcagatataccacatttcatcattcgaggaagagaaagaatttcacagaatgagacaaggcggaagtcataaaaggacgcagggcgtagatatgatggggttcgttgtacgaagaacgtacaccattataagaagcagggtgtttaagcgtatccggagacagtttttgagagctgccgtcgatttggaacgcttaggatatatcccatggtggcgagcctgcagaattatggcgtacaaagggtggataaagtacagcaacagccagggttgctccattaagtacaatatgcagaatttatttaagattgccgcacaaagcgtatcacgctacggcagaaaggagtatgtcaagtatgaacaaagaatgttactcattgcagccgcctaagattgaggtgtttcctattcatggcggtacggacatcattctgagaaagaacatcaagaaaaccaccaaggagcctatggaagagggtggagattcaaccatcgtttatgaatgcgacgaggtgcagctcagacacaagggcacagttaccaaaacagaggtgaacaacaacttcgagtactggtggaccatcggagaaggcggtaccgaggaagatgccgctgacaaagaggcagaagcagccggtgagcctaccatcatcgagcgtttggaggctgtggagtctgcaattattgagttagcggaggtgattgtaaatggctaaattttactacacacagattaagctcggaaacatgactatcgacgaagtgccgaccaggtggagagcatccgttgataaaatgttaaaggcagagtaaggcgaagggcaggtatgtatgcagcataaaagaatcccatatgccgagttttacgactatgacagattggaaaaagcggcacacgacctgcactgggaagagacagaggaaaacgaaatccttctaatcaatctgcataatcagttggtatggcatctgtaccggttcgataaggacccgcgcgcggatgccattctttatgcagtaatagaggccattttgggtgaaaaggcggcagatattacggacgtgccgtgggaattacggtgcgtttgggaaggaggtaaaagagccaatgtctttgaatgaaattctcgcaagtggtggagcgctactgctgttcttgacactggtgcagattacgcccatcaaggtaaatccgtggtctgcagttggaaagattatcggaaacggtatgagagccatcggaaagtcgatgaataaggatgttatggataagttggaatcagtgcagaaagagttaaaagacctgggagaaaagcacaacaagctcgaaaggcgtatggataaagatgatgcggacgaatgccgcacaagaatcctgcgatttgccgacgagttgagaagggatgtcaaacattccgaggagttcttcaatcagattttggatgatgtttcggactacgagcgttattgcgcagagcatccggaatataagaacagcaaagcggtaaatgccattgccgagatagacaaagtttatcagaagtgcatggaaaaaaattcatttttataacaggaggtaaagaaacatgaagaaaattgattgggttagaaaacttacaagcagaaagttatggactgcggtagcgtcattcgtatctatgatgatcctggctactggcggcacagacaacacggcaacacaggttacagcactcattatggcgggagcgtccgtagtggcgtacatcatcggtgaaggtttgactgactcagccaacatcggctccaacagtgaggatgaggagtaatctgagaacatatcgtaagcacagggcggtcgaaagactgccctattttgttaggaggaagaaccatgagtttagtagttggaagcgcaagaattgacgagaacggtcacatctccggaggaaagccgggagatcagactggaaacgaggtatcgacccaggcatgctacgtccattcaaaaggctggtactgtctgagaccgaagagagtcacggtagcaaatgccattgcagaagctatgctgcaggggtgcagaaacgacaatatcggatattgccagggacacagaagcaatgtaatcgaacagctgagaaaagccggaaagctcgcaaagatttctgtaaaaacagaggcagactgcagttcactcgtgagagcgtgctgcatccaggcaggctttgatccgggaaatttcaacacagcgtccgaagtttcggcattaaaagcaacaggacagtttatggaaccgattgcggtaacttccaaaactgaactgttcaacggcgatgtgcttgtcacaaagaccaaaggacacacggtggttgttgtttccggaaatccgagacgtggaaacgcctattaccctaagtatgaaggaacatcggggtctattattacggcgcttgctgcagtgggcgaaaaagacacatcgaaggcgcaccgggccaagattgcagccgcaaatggcattacaaactacgcatataccgcagcgcagaacaccaagatggttaatcttctcaaaaaaggaaagttaatcaaagcataagttctgaaaaaggtatcacatcggggtggctgaaaagctgccccttattttgatttaaggaggaattttctatggaaaaactttttggtattgatatttcacactggcagggagatatgagcattgagcaggccaggaatgaaagaggagtgaaatttgctattatcaaggctgcaggtgcagacgatggcaagtataaggacagcaagtttgaaaattactatgcacagtgtaaggctatcggacttccggtaggtgcatactattacggcaatgcaaagtctgttgcggaggcagaccatttcctgtcagttattgcaggtaagcagtttgaatatcctatctactacgacgtagaaggtaagatgctgaacaacagcagagatgtccttacgaatattgtgattgcgttctgtgacagatgcgagaaggctggatattttgtcggagtatatacatctgattcacatttccaggcgcacgtagacgatgatcgcctgcagaggttcactcattgggtggcgagatattcttcaaatgagccagtaacaggtcacgatatttggcagtacggaggagagtataactacattgccgataagacgatctgcggaagaactgtggatcaagatttttgctatcgtgattttgagacagaaatcaagaaggcaggtctcaatggattctctgccagcacaggagatgaagctaaggagccggagatttcagagccggaaggcagcacactcgacctactttacagaacgatgaaggacgagttcggcgggggcgacgcaagaaaggcagctctcggtagcagatacaatgaagtgcaggatgtaatcaatcacatcgacaaagcatccgtgcaggaacttgtagatgaggtgtgggccggtaagtatggtgacgatgaagtgagaaggactgttcttggcagtagatggcaggaggtccaggacgtaatcaacgccggaaacaaaaagtattacaccattaagagcggagatacgctttccggtattgcggcgaagtatgaaactacggtcaatgcgattgctcaactcaatggcattgagaatccgaaccttattatcgcaggagacaccatcagagtaaaataacaggaggaaacggtggcattatgaaaaactatatcggcgtgaaaattgtaaaagctgagccgaaggagaagaacggagtacctgggtacgccgtgaaatatccggatggctatgtatcatggagtccgaaggaaacctttgaaaaggcataccgggaactggactgccaggatttcatcaactcagtagagtaagtaagggagcctatgatccacaggggttgtaggctctttttttattgcagaaaagcggaacaagactgcaggtaaaatcaatatacaaaataaccaaaataagactgggtattttgacgaaaagttcccgagacacgataggcgattttagtacctatcctatgcctaaagactaaaagccggtattgaaccgtgtatgaagtcgtagacctatacgttttcagaggtgtaattatccacattatccacacgcatttgtggataaaatacgcttttgagagtacgcaaatgagcatatattattctatctctaatatctattatctaatctctaatatctagtaaagaatccttgtagaaaccttagaagaaatcatgtaagaaatcttacaatacaccaagcaaccatgcgggtttgcggtcctcgcaaatgaaaatgcggaacaatgcaccagtcggtgttgataatccggaaatcacagaagttgtcgcaagtgcgaaaataacttgttaaaaactcgtaaaatagaagtatatccattgacaaatacgcaactgcgagttataatataaccataatcaaacaaaacaatttgattaaatccgaaggaaggaggaattaccagttgggtaagaaaggtaagaagaaagacttttccataaaggaaaaggaactacttgaaatcgaaaaccttaaattacagaagagagaaaagcaggccagcataatctccaccatagtaatcatgattgtgtcagtgattacggcaattctgaaatggttaggtttgattgattaagtagttcccttaacggtcgggaggcagcaacaccgcctctcaactgttaagtctatcataaaggaggctgatttggcaatgaagaaattaagacagttcctacagtcggtgttgttcatcaactttatggtcggtatatacgacggtatgagagcgaagaatttggtagcaattttgataaatggagtagtggtactggcgctgatcgccggagaaaaggaagagaggtaaacgatatgaagtgggacgcaaaacacgatagagcaaagaaagtgttaaatcatttcctggataatgcaggatattggaccgagacagagagcttggcagaaggacttaccgaggacgaaatccaggaagtaagcgcagaggtagcgacgatgattcagagcatcacaaagagatataagctggatgttatgcttcctgcagagccggtagtcaaggaagaaccggcggccgaagagaaagttgaggagccagtggccgaggaacctgcagaagaggtcaaggaagaaaagccggccgagaagccaaagagacgtgacagaaaaccgaagaaagaggaggttgcgtaggatggcatacgagagaaagacaatagacacctgggagctgcagttaaattacgggtgcggctgggagtacaccttgaccgaatacacaaggaaagaggcgagggagagactgaaagaatacagagagaaccagccgcagtacccggcacgactggttaagaagagagttagaaaggaggcgattgcgtgagcacagcgacaaagctgacagcagagcagattgagaacctggcaaaggagattcgagagtttctgctggatcatgggttatggcaggacgttgatatttacttcaacggaaagaagtacacgagttacgatccggagaacggagaatattattacaacgacagggagcatctaatcgaagtggcagaccagccggagagacattttgaatatgttaatccggaacacattctcagcatgagttttgaaggaccggtatgcgagatgctgtactacggtatccttccttcggtcagaagagaatttgacaagatattcgagagatatggtttgtattatgagttcgggcatcattggaattttagttgctattacatttaagaatttaggaggacaaagaaatgaaggaagcaatggttgaaagattagtagaagcagtaaagggcatcgcaggtgaaggctacgaggtaaaggcaacagtagtcaagaagaacaacggagtggagctggatgcagttaatatcagaaaggcaggcgagaacgtcgtaccgacaatctacattcagagagaattggaactactcgaagcggacaagattacagttcatgaagcagcaaagcacgtattgggagtatacgaagagaacaaaggcagaaagccggtaacagacgtagacatcaaagatatttcgggaagagacttcatcctgcagcatgtagagtatcagttggtgaatgctgaaagaaatgccgagagactggaaacagtaccagcaagacgaattgcagacctggcggcactttacagagtagttgtatccgaagacgagactggtacagcaagttatattctgagtacggagcagagattgaatgcacagattagcgtagaagaactagataaggcggcaatgataaacaccagcaaggtcgggtttacagtgcagagcatgtacgaggtaatggcggaaatgattgcacatttcaagaaaaaagagatagaggagcagtacgacagggttcagattattgcgacggttgttatatctaaagaggacatagacgacatcatggtgtcagcactggaaggtggaattacttactgggctgataaagcagagccaaggtgtgggatagagtttaattttgcaagtgatgttatctcaaaaggcggttcaatcctcattcacgataatgaggaagatgcgacgtatgaattgacaaaggcgaaactcctgcagggaattagaatgtatgcagaacagcctaagagcagtgatattttcgaggtgatcgatcatgaattacatattgactgcggtatggtagatgcggaggttgcggatgcaatcattcagtacgctttgtttggagaaataatttacggttaggaggcgagactatggcagcattagtggtatttacgttcttggtaatcgttggagttggaaacagaaagtaggtgtaagaggtgagcaaaggaatagtgacagactatccggaaatctgttttatctgcggcagaccgtcggaagccgagcatcatttagtgttcggcaccgccggtagagaactgagtgagaaagacggattgaaagtgccggtatgtaacgactgtcacaatatgggagaaatcctaaagagaatacacggaaaccctatggcagagagaatgtcaaagattatcggacagctggcctgggaaaaggaatacgccctgcagaaggcagacgaatttgcacgaataatcgatgcggaccgaaaggaaggcgaagtaaagcaggttattcataaaggcggtagagaaaccttccgaaagaggtacggctgttcgtatttgtagaaaggagtggatcagatgctaggtggaggaccatacgaggcaatcacctgcccggaatgtggcagtacgatgtggaatggtagatgcgaaaatccggattgcaagtatcactggcatccggtagaagaggaggaagaggacgaatgacgctcagagaaaatgcggcggtactggaaacgtacctgcacaatatccggaacattgaagagataccacctggcccggtagaactggacgcactggatgcggcagtagaggctatgaaagctgcagttgaaaatgtggagtacggagcatttgcctgggacaagcagagaggcgtgttcgttccaataggcagaccagtactggcaaagcagctgtgtttgaaccgataccaggagagagtaagaaaaggagagataccaagttggattgatccggagaagttcaagattttggagagaacggtcgcagagattgcaagcgactggaaggaggcaaatgatgaataaaacagtaaatttatttgtgttagctggatgctgggaatgctcggacgacattggggtaactgtggttgcgatttccagcgatgagaagcagctgattgatagactggatcagatagcagacacccaggcaaaggagtatgtgagcattgaaggcagcattctgatggaagaacatacagacaccaggtacgaaatcagcggaggcatcagcggcaatgcaaggttctacatcacagaagagcctgcagtaattagcgagtcgcttatgggtgaaatcagcagagcaatgagtgagagcgacagaactgaggacgtaaagaattatctgcagggattgtatgaaaacgaaaacctggacgaagaaaagtacgaggaactggtagacagcgaagagttcctgcagaaggcagtcgaattattcgataagatggaggactgcaacacgccgttcaatacaacgatggagttggcggtagacgaagcaaggaaggagatggcaatatgaagaatacattaggagacttgaataaccacctgttcgctcagctggaaaagctgggagacgatgatctgacaggagaggagctggaaagcgagttaaagagaaccgacgctatatgcgacatcagcgagcagatcatcaaaaatggagagttgcagtacaaggcgatgaagcacatggacgagtatgggtatgagagacagaaagcagttccggaaatgctcgaagttcatgcgggggggggggcaaaccataaatgagaggctggcccgaagaagtgatcgcttggttgcgtgagaatgttccgggcagaaccacgaaacagattacagagctgataaatcagcaggggttcgataagaagtacggaatgacattttctgatgcagctataaagggtgcgaagaacaggtacggcataaagagcggcaccaccggcggagtcccgaaggggtactccctcaaatatccggaaggaatggaaagctacatccggagtattgcaccagggagaaagacgaaagaaattgcagaactggtgtcagcacattttaaaatagagttcagtgagaagcagtgcaaggcatacaagaagaaccatgacatcatcagtggcgttgactgcaggttcgaaaaaggacacgttccagccaacaagggaaagccaatgagccaagagcaatatgagaagtgcagggcgacgatgtttaagaaaggcgatgtcccggcaaaccacatggaagtaggcgagtacacacatacgacagacggttatcttatccggaaggttaaagaaaccggtccacaatgggagaggttcgagtttgttcatagggtagtatgggaagaacacaacggaccagtccccgaaggtaagatggtatcgttcctggacggaaacaaggataactgcgatatagtaaacctggtactgattgacaatgcagagaacctggaaatgaacagaagccggttaaggttcgctgatccggaaagaacaaagaccggcgtgctggtcgcaaaggcaagagtaacagtcagacagaagaaaaggagaaaaacaaatggagattaaagcggcgaatgcagaggagacgatccgctgcatcctggacgaagagaaaatgacccagcaggatttagcagacaggatgggaattacgagacagaacatcagccagtctctcaatcgaaacgctaagagcatgagatacgacagcttctcaaagatggtagcagctctcggttacgaaattgttgtaaaaaaactttgataaaatacgcaaattagaagtaaatctattgacaaatacgcagttgcgaagtataatatatacataatcaaacaatacttaaagcgatggaggtagtcggtatgaaggtttttagaatggcagatgttgagaagatagaaaagatgcttgcggacggaaagacggtggttgtagagtggcacacaccttacgaagcaggcaacaaggtagagacagtcaagtacgtaagatgggatggcttggtattcacaactggcgactgtgtttacacagggatagacaaactgatcgacattagagaggcagcatagaaatttttttacccaaagaactcgcaaatgagtgtttcacgtgaaacacagttcgcaaatttgaaaggagcgtatttgtatgaaggaagtattaaagaagttaagagtgttagaggctgaaatggaagaagccgagaaccagtcagagtattggatggaagaagaacacctggatacggaaaagtcagacagctacgaggctgaggcagacagattgtaccaggaagtgtacaagatgcacaaccaggtggcagatttcatcgtaagtctcacttccggccagattgacaaagtgacagcaatgttgatgatgcgtcagagaagatcagacgtagagagaattttagagatggcgtaggagggtaacagatatgatgaaatcagagtttatcgagagaacagggtttgagccgaccgaggcagaatacagagaaattgaagcagaatacatgggatgcgacatcgacaaagacgagttctgcaagacatggaaaaagcaaggtggcattcagagactgatgagactccgtgcgagaagaatcgaggaactcgaggcagaacttgtaaaagagaagaatgactacgacagaatggatgctcagtattgcacaaagattaatgaacttaaaaagcagatttcagatgatggactggctcttaatagcatgaatgctcagatgggattgatgagaaataaggctgcgggagaaattgaggaattactcaagagagcgaccgaggcagaaagaaaactggcaaccctcaaagaggcattcgatatcatcacaggaaaggagacgaagtaatatggcattattagaggttaggacagagtgggcggtttacaagaactgcttcctgcaggtggcgagataccaggcagataacagcagggcaatcgagatttggaacaacgaggacggacctattgcaagaatcacggtatgcatcacaggaagcggacttgcagaggacgagacagtgatcgacacgaataattgcccttgggcgatggagtttatcaagcaacacggctttgggcaggctaccggcagaatggtaagaagcggttactgcacatatccggtagtaaagctggacattgagaaaatcggtgagtatttggaggtggcgtaatggaaagagtgtatttcagcatcaatgaggccggagcaaagacggcaaacgatatgatgtcattcagcgagtataagaccgggagcaagactgctggttacaaggcacaggtcgataaggcatacgagctggcagagaaggtaatcgaggcaagaccaaccgaagaggaaagagtgtcgaagctctgcgagagatattcgagacgactggctcagaacatcaacaaggatattcagatcggcatgatgtgcccgtccgtgatgatttccggagcaggcaacttcccggtaaagaagaaggagaagcaggtcgcagcctgggataagaaccacgaggactacaggcaggtggaaggaatcctgcataagattgagagcatcttctacggcaaggatgttatcaagtcgagcgacgagaatgcaatcgaaaagttgcaggagaaagtggacgagttaagagaaatccaggagcagatgaaggaagctaataaggcaatcagattaaaggacacgaagaaaggagacgaacttctccgaaatacgggctacacagacgagcagatcaaggaccttagaactccggatttttgtggcagacttggcttcccggattatgcgctgacgaacaacaacgccaacatccgcagactggaaggaagaattaagagcctgcaggaaacaaagtccaaaggaacccaggaaagcgagaataagtttttcaaggtcaaggaagatacggatgcaatgagagttcagttgttctttgaggacaagcctgatccggaagtaagagatgtgttaaaacacaacggttttagatgggcaccttccgttggagcatggcagaggcatctcaatgcaaacggaaaatcggcagtaagaagcgtgatccgtgaattggaggaaatggaggcaaaggaatgaagatagaaccgagaaaaccaaacgatagaggcgggtggttgtgtatgccacgattagaaaactgtccggaaggaaaacctggatgggagaaagtcaactgtccggtatgcggcgatccttgctggaagagacccgaggatgccggagtaattgaaaaaagtaagttagatggagcggcgtgcacgctctgcgcattaaagaaaggagtagggcagaaatgacattagcaaaagcggcgacaggagttgttacatcgggtggaggtgtctacaatatcggttttaatgatggagacgagacacagttcgacgctcagaacttaaaagacctgcaggaatgctgggaggggttctgcaaggacgagaagatcccgcagaattgcgtggactacgtggagagggtgagttagtggaaactctgacacgagagatagcgaatgagtacagaaagagagcaatgcttctgccagcaaacggattgcaggacattggcaaaagaagagagttacgaaaagagctgcaggccaggtgcgatttgacggaactgcaggcagtgaatatcatcaatggttttcacattccggactatgtgaagatagcggcaatcaaagcagaaaaggaggcgtaggaaaatgagaattgagaaagaaggatttgtactgaacttggaaggtacctggtgcgagatttccaataaatacggagtccaggaacacggagacgtggcagtaaatgaagaggatattccggaaggatatgcagagaagaaactggatcagttcattggcactcataaggtcagaggggttatgaaagccgagaactgcgagaagaaagtggcattcgacccggacactaaggaatacattcagctgcaggcggtaaagcaggcaggcgacgatgtatatgtggtgcagaaatttgataatgagctggtatttatgggcgagatatggagcggatgtaagcacagagacgaagtcctggattggatgcgatccaactacgaggttgaaagttgcttgacggcagaagtgtatagaaacccattaggcgaatgtaccaatgacggaatatcttcataccaaagagagctatacgtcctggcagcacagaaaggaccttttgagccggaggacattagacagtgcgtgtacatagagagacgagatgttatgggtaaagagtacattgactgcaagcctgcatactgcagaaagcgttggtacatgatgggcggcaattttctctatacatcagacagcagatttaaggagattacagggatcagctacccgatagcaattcacgacagatacgaagggaggtaggcaatatggtgatcgttgggtattacgctcacggcaacaagcattacgtggcattcaatgagaatgaggaacgcccggacagatttatgattacggatggatttcacgacagaccggtaaatgagcgaaacgtaggcaagtacaaggggtatgtcaagatcgagaagtctgagtgtgacttgaagaaaatcatcggacgcatcagtggcacaagaccgtggcatccgctgctgaaattgcttcaaaaagaagcagggtaatttttttacccaggagactcgcaaatacgaaatttatggattgaagaatacgcatttaggaggataagacatggaagctaaagaaattgtgaatattggattggaacatatacacccgcatccggataacccgagaaaagacctgtgagatttgaccgagctggcagaatccatcaagaagaatggaatcctgcagaacttgacagtcattccgaaagaaggagagccgggggagtacattgcaatcatcggccacagaagaagtgcggcggcaaagctggcgggaattacagaagcgccttgcagaattgtggagggaatgactcataaagagcaggtatcgacaatgctggaagaaaatatgcaacgtggcgatttgacaatttgggagcaggcacaggggtttcagatgatgcttgacctgggagagacagaggacacgattgcagaaaagaccggtttcagcaagaaaacgattaggaaccgcttgaacattgcgaagctggactccaagacattgatggagaaggagcgacaggatggctaccagctgacacttacggatatgtacgagctggaaaagatcaaagacatcaaggcgagaaataagattttgaaggagtccacagattcccgagaccttgcgagacgtgcaatcaatgctcagaaggagcagaaacgccaggagaatatgaagctctatgtggcgatgatgaagaagttgggattgaagaaagcaccaaaggaggcagacgacgaattttacacagacaagtgggaacgcatggaaagttatagcctggataaggaaccacctaagacgatgaagttcaatgacaacggcgagccgatgttttacctggaacgatacggaactttatatgtggttcgcaaagcgaaaaaggaaaagaaggcgcttacgccggaagaggaaaaggcaaggcagaataaacgcaataagaagcagatcaaggctattctgaaagaagcggccaatacgaggaaggcattcatcgaaggtattttatccggaagaataaaaaaggttacagacgaaaagcaggttgaagcggatcttttcgagcagatgatggactgggagacattcacaggtcataacaagctgattcagttctttaccgggtgcgaggtttacaatgcgccaaatgaagaaatagaagcagcacgtaaggaaatgcagggactcagcgtattgcagaaacttctctgcatggtatcagcgatggtcgctgatgcagatttggtagagtggaattacacatacaacacggtcagaggcaagaaggtaaaggcgttctacggaacactagaacagtacggcttccagttccctaacgatgaagagaaaagcgtggtcgaaggaaccagtgacttgtatgtgaagaaggagtgttagcgatgcaggaatgcgagggatttataaaagatgccgattgcaccaaagatacgccgcttatgtatggagaacaagatataccgatatacggtaccggcaaaaggatagttccgagaattgaaggcaggagagattcttcccacttcgagaagattttcctaccggaactgctaccgcttgaggagtacgacctggttgcaatccttctttccggaggaaaagatagcatagcttgctattacaagctgctggaactcggagtaccaaaagaacggatggagttttggcaccatgatattgacggtggcaacccggagagaagaatggactggaaatgcacacagaattatgtgagatcatttgcagaagcagaaggagtaaagctgagactttcgtggagagttaatggatttttcggggaactgtatagaatcggtgcaagcgaaccggttgaatggcttgacccggacaccggagaagtgaggcagtgccgattgtcgagaaattatctgcaatgccaggaaattaaagaaaaagccacggaagatatggaagcggaactgaaaaggctggggtatagaatgaaattccctgctaaaacaggagacttgagcaggagatggtgcagtgcatatttgaaaattatggttgcagacacggtgatgtcaaatcttagccgattgcaggagttggaacagcttggagggaagagacataaatttccagcaaaaggcggtacccaccaggggcgttggtgcagcggaaatctaaaggcggcagtccaggacagtgtaacgtcgaacctggaacagacaaaggaaaatgtaaagattttagtcgtctccggagaacgacgaggcgagtcaaaaggacgctcaaagtataacgaaatagaaatacacaggacaaacgcaccagcaaaagcgcatagaatagtgcatcaatggcggccagtgatcgactattcagaaagagacatatgggaagtcctaaagagacacaacatcaatccgcatccttgctacagagcgggatggaatagatgcagctgtgcgatgtgcatattctctactccgaaactgtttgcaggaataaaggagatatatccggaagagtttgaggcattgaagagagacgaagagatacttggcttcacactggataataaatgcgatttagaaacattcgtcggagatgcggagtcatgtgtatatcacggagattttgaggcattgaggagtttgattaccggagaatttacaatcgatgatgtgtatgtgaagggacgatggatgtacccggcgggagcatttcatggagcggaaggaggaccgtgttaggatggaaaagaataaaagaccggagatcacggcgatgttgtcgctctcaatccagcggcacatctgcccgaacaatgatccgagaatttactgggccagggaagtgaccttcgactacgccaccacgaatgcggtgcgggtggattttatgagattcaagccggtaaacaatacggtgtccggcatagagaaaggagacttctactgctacgaggttaagtcctcggtagaggattttcactcgaagaacggtcacaacttcctgggagactacaattattacgtgatgccggaggaagtgtacgagcagatcaagaaagaaattccataccaggtaggcgtgtatgtaccggatggaatgaactaccggggcgagtggtacgacctcaaagcaatcaagaaggcaaagagaaaagatagaagcaggccggtatcggaaatgctgttgatgatgttccggtctgcagcacgagatagaaagaaggtgttgagcgatggatgttaaaaacaaaaacgaattaaagagaaggatagacctgtttctgcatgacttcacgccggaagaatataaaatcaacgaagagttttgtaaggaaaccatgagaatgatggctgattttatcggccacgtagataacagactggattcggcgaatgccaaaattattgccggaaggaagagagaaaacgaactggcagaatacatcctcaaagagtgtcatttctgcccgatcccggttgaagttaaatgccggtatggtttcagagagaacggatgtaagaagtgtttattgaaacatacggatttactggataagccaagggaggattgacgcatggtggtgaatgcaaaatgcaatgcctgcaaagaacccacaaaatatgtggcggggttctatgatggaccaaagggcaggcatggatgcctgcttgattgcaaaaatgagcagtgtgaggtttatcaagtgaagaggtttacagagtcggagacaatcaaggaaagaattaagattcagaacttgaacagtcagaagggaatgtatgcaggctatattgcagcactgaggaaagatgccaaaataacaatgatgaaaatgtcacagattgccggatgtagtccggcagagtacagttcctacgagcatgagcggaaagagtttgatccggaaatataccgaaaatgcgaaaaatatctgaaagagaaggaaggtggagggcgatgctgacgttgccaataaaaaagaagtggtttgatatgatcgtctccggagagaagaaagaggagtatagagaaatcaagccgtattacgacagcagatttatgaatgcgttcgggttcctgctggcaggcgggcagatggtatatggagaggcagcaccggaagaaatccggaagccgtggccggtaccagtagtattcagaaatgggtactcgaaagattcgccggaagttgtttgcaaatgcaccctgcaatttggaaaaggtaagccggaatggggtgcggaacccggtgtattatattatgtgctgaaaatagaaaaagtggaggaggtaagaaatcatgtgttactgggatgatggagattattttgagccaggcgaatttgacgagaaaattgaagagttaaagaatgagcttagagaatcggtaaaaaaggaaatcaacgatgaaatcgagaaactgcgcaaagagaataaggaactgcagggtattaagagaaacttcgagtcggtgaagaaagactttgagagaaagaaagacgagtgcgacagggcgatacggaatgcagaaagcaaagccaagcaagccaggttgaaagagttaatggaacatttcaaggttactctttgggcggtaagctgggactatcggtataaaaagaaatgcgataagtgcgataaaaacagaagaatccaggtagtattgccgtccgggaaaaccgtggacgatgagtgcagctgcagagtgaataagaaggtgtattacccaaaagagaatgtgctatacgaattaagcgagagaaacagagagttcatggcgtggtacatggcgaaaggagacagaggagaagagtattttgttggaggtccccgcgctgaatatgcgaaggtagtagtggatcacaataaggatttcaaagaaatagagacagaagaactaagaaaagtattcttcacaacgaaggaagagtgccaggcattttgcgattatatcaatggcacagaagttttggggtacgattacaatgttgaaggtcagctgattgcacaaagagaggagacggaatagatgaacaaggtaattttgatgggtcgccttacacgtgatctggaggttagatattcccagggagagcaggctacagcagtagctcgctacaccctggcagtagatagaagaggaagaaaccaggaaaactcagcagatttcattgcgtgcgttgcgtttggcaaggcggctgaatttgctgagagatatttgcataagggaacaaagattgtactgaccggaagaatacagaccggcagctataccaataaggacggtcagcgagtatatacgaccgacattgttgcggaggaccaggagtttgctgagagtaaaaacacagagagtagtaacgcaggaggctataacacacagcctgcaacggcgccacagtcggggaatgatggatttatgcctgcaggagacgacagcgagctaccgtttgtataggagggcaaaggatgaaacagtacacattgaacagaaagacatacaaggatgttaagagaatggatcatcagcagatggatgcgttctgcaagaatttatacaaggcaggccatgcggacggcatgaaagatgcggaaggcttgactgaggatgaagtgagagaagttatcctgggcgtgaagggcatcggaccaaagaaggcagaggatattgtgaacgctctgactgcagcacagaaagaaaggggttagttgacaaatggataagagtaaagtatatttagaagtgccggagttcactggtgaaaatgtacctgtggcagtagcggcgagagtaatgaaaaaggatcagcagtttatacgccagggtattatccttgggtttctgaaattcggagttgcttttaagaaggaagggagcagccagtacgattactacatttccccgatgaagttttgggaagagacaggtttcgtgtatgccggagaggaatgctaaataagccgtgagaagtgctgaataggtataaaaattgatgaataggaaacatacaggcaacaaaaatgccagcggacgcgataaatacgtgcattactgtttctattgaggaaaacgctaaagcgggaaaattctaagcaaaactgcatagaataagactttttgaaggctgtactaactttttgtggttggtacagctttttcttttttattactaaaagtattctatttgaggttaaaatgcccgagacgtatacaactgatgaacgactaagcgaaatacaagctaaaagtaatcaatcattctaggcagcacactcataacgtatctcccccacccccatcccatggaaaatccagccctcgtcgtttccattggggaagtggctaataacataagatttaagtctatatgaaaagaagatgccgcaaaatgtacaataaatccttacattttgcggcatccctacattaaattataagtttttacccaacagacatgacagcttcttcaatcccacatagcacccgctccggagtaagtggaagctgatggaaacgaatcccggttgcatcctccaccgccgaagcgatggcggccgcaaccggtatgattcccacctcccccagccctctggcccccaatggtccctccgggcatggttcctccacaaatccaatctcaatctccggcatatcctgtatggttggaatcagatacttttgatatgaatctgtgattgggcgcttaccgcccagatatttcatctcctccatcgttgcataaccgactccctgcatgattccgccctccaactggccagatgctatgaccgggttaattacgtttcccacgtcatggaatgccgcaaccttcagaatcctgacttttcccgtctccatgtcaacctccacctcaacagcctgggcataccatggaggtgaattctgcggctggttctgttccgcaacaaaaaatgattttccatctagatgtgcttcataagctagctgtctgaccgaaatttcctttcctcctccgtctatcctgccagtctgcaaaccggatcagttaaatacaaaagaatgacataggtggagcctgatccaaagcaatactaaaataaacacatttttcccgccccggcagtgtcaagtcaatctcgcggtagctagtaatcttctgcactttttttattctgcataatctgcagcctgattcccgggccaagcactgcattcccctttaccctttctgctttggagaacagccggtacgggcctttcgctggatgggtggttggcaggctatcaaagattccatcaatggcttccaggctctgattattcagcagcttatatgcttccgtgaatctttacaagccaaaagccccgggagaattcatctcccagggccaaggcatctatttctcacgccctaaaaaacacccatttccaggccgcaaattcactcaattttccttcaaaaaccactatatcttgtggttttatccttcatttttcttcaaaaccacaattcggcatctaaactaccgtagcttaatgtggtgctacggtggaatagatgccaatccagaaatactgagcctacaattccaccaatggtcgatttcatatactgttgcaatgttttcatcctatgaaatcgctgcatcatatcctgctaaaatcattttagcctttcgtacaaaaccgcatattgcatggaacaattatagtagttcagcaaaaattcaatttactctccatcatcacattcgataaaatataaaaaccagcaaattgccagtaggtcggccgcccctcccggggataggttcttacttataaactgatgatccaaatctcttattattgccgcagccggatatttctccttattgagaatttcattcagctgctttttcacatctatatacgtgggataatcagatcttgcaatgatattcgtatcaaccgcttccgacaataagtagagaagcgtaatgcttcccgcttcatcctttgtatagccttctgccaacgcctttttcaatattggaagacctgtattgagaacggtgggaaatccatccgccgcttctcctctgacaccctttattccatatttcttataaagctgacatcctgctgttggccgttgctgctctatatggttaaaaacaaactctgcatatgtcttcgacagggtaccgcattcccccaaaatctgttctgctgtaagttttcccccgtttccttttagccttccaatcgcgccgcaaatgatgcctattgagaaaatagctcctttatgggtattcacattttgggtttcattgaacattgcactttcagcattcattccttcatactgcaatttccgaaatgttttctcaggtgtttccatcgcggtttcaatgccgattcggagcattgatttgaaatgcggaataagagctaccgaactatcgacaaaggaataaaaatccatgtcatgatgcgagccgttattaaaacgatccaccaatcctggttttggtgatacagaaacttcgtaaagcagcgccttcattgcgaaactcgctatcttttctataaaattatcaaaaaagtattcttccatcatctgaaacgttttcttctgaagttcctctgccggatggactctgcgggaagagcaccgatgaacgggaccaccgcaaatcaaacacctgcgttcactcaaccccactactccccgttccatctttattccgtcatgagccaaaacatcaatatcaaaaagtcttcccagcggatgcgtgtcttctatttctgacatgatacattttatttctatattatcgcaatccacaacaataaaagcttcatttcccgtagcctcatgtatcttttcaaaaaaaagaactgcaatacctctaactcttaactgattaaaaatgcatgttactccttcttcgaaggttttctgaatcaaatcagaatttttcaccggccccgcaatattcaaagtaaaacagattacgtttttttcatatttccgtattaattcctgctggcggaatgctcttgcttccctcgctgccatcatgtctgtaacctgtacttttctgatttccatcttcacacctctttataatcagtagtgtatgacgtcctgcgccttttgtattgcttccaataccggacgcgcctcctctgagtaaagatattcccatgttgttttcggaacaaatggacaaacgctttccagctgtccatcgtgaatccactgtctcactttgctggcgctgattacttcctcatttatctttttccgcggaatttcttctgctttaatgcccaccttattcaactgttccagcattacacgattgtacatagatgttaccatacttttcttttcttctcccacaaatcgattcgtaatgccaagttctctggcaattatttcaaatattgcaatgtccagttttgcatgagcctcacatacaactgcctcttctttaagaaaataactgggaaacgttccctgtgaaatcatatacggtccgcttgcatgacaaatcacatttttcagatgcgcagttcccttttttaccaggtcctgtcggacagaaaatggaaacatgctgcagtcttcacttaccacaaaaacatgaaggatttcacacttttttgccgcctcctcaacaagaaacaggtgccccattgtaaatggattggcgttcatgactaccgctccgacctgctttcccaaagactcaacatcatgactctctcgtttcaaactgtttaaataattgggaaatccatttttcctgttctccaaaaaggtaatcatcccatctacatttgcaatttcataaaaccccagatcctgaaagaaacaggcctccctcattttcgtataaataaacagatgcgtatttcccctggatatctgatactctgtcaaatgccggatcaacagattcaaaagccctctcccttgatagcgatgatccaccgccatacagcggagagtatttccaaagcagcttcccgtggccaccggatttccaatatcatctaagatgacacatgtataatccagattgccatccctttgaattccttcctgttccaggagccgagtcactgcaagattcattttactgtctttttcagaaataccctccaccatataatccatttctatttcacctctcgcacaacatccataatggttccgtcgcggccctcaataatacctacgattcgttcaccaaacttaaccggctgcggagtgcctacgatatcatacgcgatatcccttaattcttcaattgtcctcagaggaacacaatcggcattctttaacgcctccaacaaatcctgtctggccggattgactgccactccataatcggttactaccacatcaatgctttctcccggggttgtcactgttgtcacatccgtacagattgcaggaatccttccctgaaggagcggacatatcacgatcgtacattttgcgccctgggcggcatcaggatgtcccccctgggcgcctgtaatgattccatctgaaccaactaccacattacagttgaaatgtgtgtcaacttccaatgccgccaataccacatagtccaatttgttgacgaaagagcctttgttaaagggattggcgtaagcgcctgcactgattctgtgatgattcggatgttttacggaattaacggcaaacaagtcaaagtcctgcgtatcaagtaattttcctacaagacctttatccagcatatcgaccattcctttgctcataccgcccacagcaaatcccatcttaatcccacgttcctccataatcttggcaagcaatgcagcagaagcaatggacgctcctccaactccggtctgataagaaaatccttctttaaaatatggcgtattaattacgacctgggtgcagtaatctgccatcataagttttctggtatccgttgttggctttgccgcccctgtcgcaatcttttccggaatgcctattgcatccaccacacacacataatccacccttgtcatggcaacatccgccggaaaattgggaaagggaacaagacagtccgtaaccgcaaccactttatttgcatgctgtccgtcaacaaaggaatacgataacacaccgcagtcgctctttcctccaatgcctttgcagttaccgtaatcatcacatgtcggcgctccgataaatgatatagctatgattgtctccccactctggattgcccgcacacggcctccgtgcgaacgcatgattgcaggctttttcagctttccatgtgagatggcctctccgatttttcctctgactcctgatgattcgattccggtaattgtcccatcctcgatatattccagtaatggatcatgtgcttttccaagagagcttgcacaaattgttacatctttgagccccatatcatggacttccttcataaccatgttgactacgagatctccttctctgaaatgatgatgaaatccaagtgtcataccatcatgagccccgcatttttcaagcgcttcccgaatggaagataccattttacttgtattgtgatccatgacaggttttacaatcggtccctgttttctgtactcaacaccttctttatagttgttgctctgaaacggttcctttcccgtcaatttgagaatttcatccggaatttcacgtcctactgcatttaacatcttaaaattcctccttcaaaactcctgacgcttttgccagttcaatggtccgctttgctccgtcataaaaggcaatatctatcatttttccatccactgtaaaaacaccgattcccagcttctttttttcttctatttcttttactactttctgtgaaaaaacaatctccttttgtgtcggtgtatatatttcatgaaccggagcaatctgccgcgggttaatgatggattttccgtcaaatcccatcaaatggattgtttctacatcctttttgaaaccttccatatcgtccagatcggtatacacagtatcaaaacattgtacacctgcggcccgggctgctataatcatgtgctgccttgctcccataagttccaccccggtacctgtaattcttgtctgaagatcttttgtgtaatctcctccggaaagagcaattccaaatagacgttcggaagcattgcagatatccagcgcgtttaacacaccttttgccgattctaaagccgccataatcaaaactttccctcgctcgattccaaattcgttttcagcctcttccaccgccttttctacccgtttcacatcctctgcagtctctgttttcggaatgcggataccatctgcacccccggctactgcacaccggatatcctctttccagagctctgaatcaagaccattgattcttacgatacactcgatgcccctgtaattaatctcccgcagggcatggtacaaagaaaaacgggctgcgtctttttctttttctgccacagcatcctcaaggtcaagcatgatactgtccggcttataaatatatggatccttaatcagtcctggtttctgcgcgtttaaaaacatcattgttcttctgagtctttttttatttggattcattatcgaaccgcacctccccatggcacatctgttttctgtccggcgcttctgtacacagcgcactccacacgtgccttaattgtacaatctaatgctcctttgtccacaatactgataaatacatctttcacatccaggcgctccaacgtctccctgaccactttctgtatctgttctccgaactgattcataaccacactttcaagctccaattccacgctgccgttacccggttcaaccgtcaccatacaatcgctggactcgagcgttccggcaattgccgctttgtcaatcttcatcttttcaccttctttttaactttaataaaacaacccgccaagattaaacacaccaagcgaagaaagaattacatttaaaagtacatttcctaccgagagaaggaacagcgtccggaacatcttgttcagttcagccgtactggtttctcttgccgcagaataagatgacataataattgcacctccggtagataaggggctgattgccgctgcaaatgatgtagctgttattgctgaaatcagttccacgtaattgacgccgcttccaaacttttcgcacacctctgccgcaattggatataaagtcggcataacaacccccgttgtagaactgacccaggacaagattcccgaggtggccgccagtatcggaaccgctgtcttttcaatcataaatcctgtcaggaaatcggaaaccaaggtaataccgcccagtgtatcaatcacattaatcaggacaccaactccacatataaacacaagcgtcccccacggaattccttttattgctttcttttcatcaacaacaccaagaagaactaaaacagcagctgtggcaaatgcaaacaaacctgtgtcaagcttaaatccgatacagcatacaaccattacaacgattgccgcaatcgtaagcagctgatcccgattaaactttggaatgtctgaaagcttcagcggattgtccgcttttactttataacctttatacagtatgtatacaacaagtgtaaacaagaacccagaaagcagtgttgacaaaaacagatgaaggccaaatccactgtaacccagaggctccgaaagatttttagctaaaacacccgtcagagaaagaaccgatgcacatccggcattcgcccccagttttgcataaagagacgttgccataggattgatatccatttcaaaggccagatacatagcaaatgttgtcatcaaaatacctgccgcaatatgccccggaccgattgctgaaatgaatgccgacaaaaaaaacatcagaatcggaataaggattgtccgttttcctacaagtgcaaccaccttcttagaaaacagatccaatgttccattattggatgccataccaaacaggaacgtaacacccaccaaagtcacaaacatggaactgctgaatcctcccacaatctcttttgccgacatgcctccaaatgttccgagcgcaaatgcaacaccaatagaaaggaatcccagatttacttttcttataaaacctattgccactaccactacaagcacaataagcgaaataattgaaagactcataatatttcctccacacattttaaatagcgattcttgttccggctaaaaccgtactcttgctaccccttccataatcagattcgcagtgcgaaatccaaacgtatctttgatttcaggaatcttattatgctgctgaaagtcaaccccgcattctaatataccaccgggatgtccaattcgtatatactgcgtatccatatgttctgaacacacctgattcactatgctgccgggaaccacagccgctgctgcagtacacatggcacccgtcatggcatagctgggatgtgctttctgcatagacatcattctggagaccaaatcaatactttcctgtgtcacagtctctccatccatggtcttatactctttgggctgagctacaaatgccattttgggaattccaggagtctcccaggcggatttctggtaatcgtcaatcaatcccagcttcactgccgcaagtccccgaatcttttccaataaagcaagtacttcatcatctgcattcacagcatccggaagttcctttcccgtaagtcctatgtcctccgccttcacaaacacaagagggtttgccgcatcaataatggaaacttctacatttcccagtcccggaacttccagtacatcaactgcatttcctgtgggcagcaatccctttcccaatgttcccgccggatttacaaatttgagttttaccggtgaagccttacccggcactcctgctatactaaaatcgccctcatataccacatttccatctgaggtcttgatatcagcaacaatcagcttatccgtattcgtattatatattctgactgatgttttatcattttgtactttaatcaagcctttttcaatggcaaacggtccaacacccgatgaaatattaccgcaatttcctttgtagcttacgattggtttatccacagatacctgtgcaaatgtataatttacatctgcgtcaggtctgggagaaggacttacaatggccaccttactcgtcacggactgtccgccgcccagtccgtctatctggttcttatccggacttcccatcattctgagcagtacatcatcccacttttcgcgatcatccggaagatcactctccaaaatataaacccctttgcttgttccgccccgcataatagttaccggaacatggaatagccctgtttctttatttaacatcagattccctcctgctgttactgaacagaattatgtttgcgattgtaatttatcaaagaaccacagcggataatttctttttcttcctctgtcagcggctcaattgccagtgataattttcttgttttatcgccaataataaatgccgtgattttcttcatgtcggtgttaagcgcttttttaatatcaggtacaaatatataatcatcctctgaaaaatcggcaggaccattcaaaataaagggtaccattccccaattaatcaaattcgagcgatatcgctttgtcgcatattctactgagatattcgctccgccaagaagcactctctggcaggatgccgcctgttcacgtgctgaaccgtctcccggctttaccgcatatattgtacttgaaagatcaattgactcatcctctactttttcatatcccgggatcgtatgtattttatcaagaatttctctgatttcttcaggacaattcccttcttttcttgccttttcattattcatcaccgcttttgctttccctacatactccggcacccgtctgcttaatgtaaactcagccagccccataggattggatcggaatgaaccggtttctccggacgggataagttcatccgttgttgttacaggatccgtgatatacgcgcatacctttagaagcatattctcattcaactccggaagctcgggccaggccttaatattgggaccacagataagttcctcttccggattgccctttccaaacccctgataaactctgtttgcatatactttggaatcataatgatactcaggacactcataaacatatcccaattcatccgccgctgtgattcttccccggttggctgaagttgccgcaacagaacgcgcatccatcaaggctacacttgcaatctgtccattacccggcttagatccctcacgattggggaagtttcttgtcgtatgtctaaccgcaaactgtccatgcgccggtgtatctcccgcaccaaaacacggcccgcaaaatgcagtgcgaattgtcgctccggcagcagccaatgtctcaattgctcctttctttaagagatccatcataactgcctgagagcttggatagacactcaaattaaacgcatcattccctgtggatttattttccagcagataagcagcctccataatgttcgaatacgttcctccagaacagcctgcaattgttccttgatctgcatacaaagctccatcatggattttccctctaaggttcaactgcaaatccggatttttaattaattttttcgcattttcttccacttcgtgaagaatgtcatccagattttcatttaatacacgaatttcatacccatttgaaggatggaacggcaatgcaatcatgctgtgtatggcagacaggtcgatgtaaatgcatccttcatagtatgcaatcttttggggctcaagttttttatattcgctgcatcttccatgagcagccaaatactttttcgtatcttcatcggttctccagattgaggaaagacaggtagtttccgtagtcattacgtcaataccatttctgtaatccgtactcattgacgaaacacccggtccaacaaattccatcaccttattcttcacatatccattcttaaaaactgctgtaacaatcgcaatcgcaatatcctgcgggccgactcccgggttgggctttccgtctaaatatacagcaatgatttccggatactttatatcccatgtctcttccaaaatctgctttaccagttcccctccgccttctccaacagccatcgttccaagcgctccataacgtgtatgtgaatcagagccgagaatcatcttgccacatcccgcttccgtctcccgcatatattgatgaatcacacccatatgcggcggaaggtaaattccgccatatttttttgcggtagttaatccaaacacatgatcatcttcattaatcgtacctcccactgcacacaaactgttatggcagcaagtcaaaacataaggaatcggaaaccgctccatccctgatgcacgcgctgtctggataatccccacataagtcagatcatggctggtaattgcatcaaaccgaattttcaaattctctttatttgttccggtgttgtgctcctgcaggataccataggaaattgtaccttctttatactgttcctttttttccaaaaaatcgcttccggcttcattttcttcaacaatcgtttcaccctccagaaggaacacacccgaatcatataatttcattcttctctatcctttcactgataatggattcagactggccagatctgttttctatacctatattgtatatctctaaatacaatgtgtaaaattcatattttttatttatttcattcattaaagctatgtttatatctatttttcacatgattaaactcgattttttgttgattttttctaatttccttctgattttcacttaatatcctaatttactaaatatacatatttttcataaaaactatagtttgtaactatttcttgtcaacacaaaataaaacgattataatcaatatatcgttaaacgttttatatttatctacatattaataaatttacagaaaggaattctttcatggattttcgagaactgaattatgtccttgcaattgaaaaatatcataacattaccaaagctgctgaatctctttatgtgagtcagccgacattaagtaaatttcttgcaaacctggaacacgaccttggccaaaaactttttagaaaacttggaaataagtacatcatgacttttgccggacaaaaatacgtagatacggcaagagaaatccttcttttgaaatcgaatttggacatcgagcttgccgacatcctgaaaaaagacgtaggtgttctcaacgtagcttttccacgcatgcggtgcacctacatgcttccggctacattacctgtatttcaggctgagcaccccaatattaaaataaatgtctttgagggaagttctgacgaaaatgacaaacttttattagaaggaaaagctgaaatcgcattttacagcaagccggaaacgctgaatccattaattgattatgacaccatacgtaaagaagaaatgctcatctgtctctgcaaagatcatccgctcggcaggtatgcacagcccaatccctccagcaggtatccacgattagatccgaaattattgaaaaacgaattgattctccaactgatgcctgaacagagaacacgacagattaccagccgatatttcagcaacataggtctaaactttgaaaatgtcatgacaactagcagtctgcctgcaatcatggaactggtttccgttggctatggagcctcatttatattcgagacccatctcatgcaccatcattttaccaaatccattgactgctacagtttcggtgaaccccaaaccttatctgactttgttgtagcttccagacacggaagctatcttccctcctatgctcacgattttattaagattgctcgagatctttttaataataacaatttatagatactccgaattatactctagtgccacatccagccagaaacgatactgccagtgctgaatattttgtcagcctgcaaggcggaggaaggaagcggagtggttcctccgctgactgacgacaacgcggcagatggcaaaataggcagtgctggcagtatcatttctggccggatagggcactagctgcaaactggatttcaagcggattcgggaatctgctggctggccttgatatgccgcatatcaggtttcatgaccagccttagcaactacctctttggagattgcttgaccacgagtcttattctaagatgcgcgtctatctctgtcattgatattttcatggctcccagggcgtaatcatttatccaccctcttggcacttgattcgctttttactgctattgcgcagccattggcatatctcgtgaaacggagtcctcttgcttcaaattctttgtcctgttttttcagcataatggttgacaacagtgagaggtggatagatctgtcctgcggtatcttaccttaatagggtcagttatcgtaattagggactgcaatttaactggtggttaataatcctcatccaaacattaccttatattgaccacagatatataaaaatccccgggagactcatctcccagggccaaggtttcttaacgtggtgctgtagcggaatagatgcctgcatctacattattttattgatacattggaatactatctatcccttaactatccactcacctgaacggttctttccccttcttacaatatatctgatgacaatatatcccttatcctgcaattctgcaatcatccgttttacagtgcgcaatgaaactcctaactccttttgtaattccttttgtgtgactcttgcattctgcttcataatggtcaacactctttcttcaggagacgttaccttaattccaataatggtgctagaattagtgccaatggtgacataattagtgccaatggtgccagcttggattaatgacggctgactgtacatatttatacggaaatccccgtcaaaatcgattagctctggttctggaagaaaatgagcattgatgtcctgcaaatcttctggctcgcagctttccatatagcgcgggatattcagattgtactcattggtaacattgacttcctcatcaggcacaaacatggcgaggaaagtagtcacgattttatgaatatcctgttcacgcaggcggttcttgttaccgtcctttacatagcctttgctggcgtctcataaaaataccggtgcgctctgcggtatcttccttttccagcaccaggatgcagtcaggaatccccgtgccatagaacaggttagcaggcagaccgataatgcccttgatatagccccgattaatgttctttttgcgaatgtctgcctcggcgttaccgcggaacagcacaccatgaggtagaatgatcgcagcttttccgttggacttcaaagatttcagaacgtgtagcagccaggcatagtcaccgtttttctccggcggcacgcccaacaccgtttcgctgtatcggctgtacacatcaggaatggtaatgccatccatccaagatttatccgaaaacggtggattaaccacgatataattaaacgttttcagtagttcagggttgtcttcctctttgtacttgggtgcagacaaggtgcttttattgccgacaacaacaccggcccctttgttgtgcagaaccaggttcatgcggcccaaaccggcggtggagttatccttttgtggaacgggcatccagcggctaccagcataccacccttcaagacaaatctgtcccgatactcagaaaaagagatgcgctccagaaagcgctccatcatataatttctcattaaaatatgtgcatctgcagatttttctttcgacagattgcggattaagtctttcagctgccttgccgttcttatcataacagtacctccaaatattgccttaaaaccttttctacatgaaacagttccgcataattcatcagcacacgtaaatttttatctttccgaattacataatgccttaatgcaccctgtagcgtctggatttccatattgcttcggcaacgaattaaatcgcaaatggtacgctccatattgtagacaggcacagtatgtccaaatggcgtttgaagattatcaatgccaatttcatatcgctctggtttaattgtataaactgtaataccatctgccttcaaccgcgacggactatatccccgttttactgtaacggaatagggggacggttccctatccgtcaagtcatgaaaaaacaaagctgtttcatgggaaaagacagcatggctacagcgcagatgaagcaaatacatggcatctacccaggtatctaccgacacataaacaccatgtgctgcctgctccagtcctttttttctgacaaaatcataaaatatcggcttagaaataccttctgctatcacctgtgaggtgagcaacatccctccatgattcaccagcatttgttccaactgttcgattcttgtcattttatcacttccttttgtatcactattatactcaaacgtaatacgaaagtaaatagtttcatctgaaaaagcatggtcatggtccatcagtggatataacccctgaagctttccgctcctgttatccatgtaaagttatgctgtaatgtgcttcctaaaatgcattcttcagccccttttctttaagtctctttaagaagtactccccagaaacgctcctcaacctatttacccaacatctttttctgagaaatacaagaagccccggaagaatcatcttccgaggccaaggcatcttatagtttcctccatcatatctccagccagacagcctttaaaccactgtaacccaatgccattacaatagaaaaagcttacttaacagagaatgacacttctatcacccctacttcatataccgcttaagctcttcataaaaattctctcgcgtaccggccaataatacaaccactagcttatcatcttcttcatagatgcgatatgctatttcataattggtccggttataataaacatcatatccataaataccggttaaatctcccacctttgcagacccacaaaagggattttctgctatgctgcaaagcgcttcctgaaacgcctttttcagccccttttctttaatcttcttaaaatatctttgagcggcactggtatatcgtaattcatacatctattcgccctccgcaccaaaaagattctccatcggaatggctctaccctgctctgcaatgcggtctgcttcttcgattaaatgttccacagcaggccgaatctttctgctctgcgctttaaaccttgccaggagctctgttcccgaatatccctcctcaatcaaatccgcaagaatctgttctgcaaattcattgccatccatacggacgggccgaagaaaaatgcctccattttgcagaatgcattccgcttccccatcaaatccaagcacttcaaaatatttctgtggtatcgtaatctgccgctttgaggatatactaatgattttatgttccatgaccgactcactccttgctgtaattgccatttgattcactcctcctttctatgatattctgtattttccgatttatacctttttcttggtttctttgcttctattttatcacattattaacaattatgtcaacctctcttgacaccgcttccacgatacctgcaagcttcagtgggaaataatctgtaaactaaactttgatattgaaagggacgccataaattggttctttcattgtaatatctatatagaaaatatcactgcaaattcccttcttagcatagtattgctccaaatacacggccatttttttataaaactcaaaatcttccgtgtagatggcaatatcaatatcgctctccccttcacataccagattgtaacataactgccaaatatgaatatattatattcatcagctcaaaataaatcttctgtctctttttgcagatccagtagtccgtacaacctgtaccgcattttatctcttgcgtcttccttcatttccgtttctattatcactcttcagtaatatatagatattgcaattgaagcattattggcagtgtaaccttattatagtaccattgccaatctcccttttttacatcgtatagcatttcatatgattattatataattatttataccataatcttaaatatgcggatagctgatgccatccgcatattccctattgtatagatgatataattcttaaccaaagtaataccaaatactatgtgcttcatcctttaagagacatcattacctacatgcttaaagtatcaatttcctgcgtcgtagacgtcatatcttcgtccagctgctcttccatccccatcctctgatgcagttccctgcatcgcccaagtactgccttccactgcgtatcacctaaatcttccggttttttcatggtcaaaacattgtcaaatgatacctccgcatggttcattgccttatacgctgcctgctgtaatgtctcatcctgttccgaagtctgggacggaatatcctcgtcttctgaaaaagcatggtcatggtccatcagtggatataagccctgaagctttccgctcctgttatccatgtaaaatccaaaattggctccatggcggtcttcatttccaagtatataatctgctatctgcattttataataattggctgcatccatctcctttaccatatcatattcatttttatcgtggtaactgcaatatacctgaaaatcttcccatggaacaagagcggtttcttcggaagatataatacggcattttactattttttctccgcttttatatattttttctatatgattccggtctgctatcttctccagactgctgttttcagcctcgatatagcttacgtggggaatatgaagagcatccagtatcccgctggccggcaattccttttttccgactttatacagataaagtccgtccgcctccctgatccaggctttggccgccatcccctgagcagtaaactccggtgtatgaatcttctgtacaagtgtgtggaacgtctggttggtaccaagaagagcggttgatgtgactgctttctcccatggattttcaaacaggcttacctgttcccatgtaaacgtttcttcggcgtctttcatccagtaacaatcagaaagggaagcaaaatgaaataatctggctatcatatatggattactttggctgatacgaaaaccggccaacagctttttagcgttagttctgcctatgttcatggtacgtttctcagtccagccgtgcatgacatcgtcgtagtttacatccggataacgcagcgagatgggaagtaactcatagttcaaaatcgtacatctgtaatcctctatttctaatacagggatatcttttagcatgatatatgtattattcattgccgctcacctctcttctctcggatatggaataatcattatgtgggttttattatatcattatttttatgcattatctatttctttattgagacaaatgcttattccaatcgacattataaaatcttatttctgaagcatcagatttcatgatacctgtttctcatcctgcttcatggttacgggggctctcttagtgcccaggaaattgccggaccgcataggaattcttcatatccgcaaaaagaagcacacagtcctattaatcttaatccacagcagaaaaacttcctgcctcctttaccagatatctccgattgtgaagccctctggaaatggatcagactcatccaggacccatttattaaatccataaatccagcactgtcctcccacgaccgggacaacagccttatggccatgagaattcgcgatttcttccgtcagctttcctgtaaacttaataccaagcagaccttcatttacaatttcctcacctgttttcaggcgtcctttcgcatgctctactgccatcaacgcacaaaatccggttccacatacgccacggtccaatgcccctgtcatgtctccggcttatcaaaatcaacagggccggttgcataccagttagggtattaaaatttgattcttttcgtaaaatgcttatatttaaaggccttcaacacaatacacgctttttcagttttttaatgaatatgcctcatgatatcattataaaatatgtcagcgaagcaaacaaatacttggattgcatgagccatcatacatccaaaacataattcattttttcatggctggtctccccaatacgtcaaaagcctaaccaccatttccggtaattaggccttttgtctagattatgacaccagtggtgtcacaatctgcaatcttgatattataacaattttaaatattccaatcttgttttcaccaatgccttttccagtttttgattttccttttttagttcttcattttcccgctttaaattctccagttctatcctataaatctcattctgtttttccagactatattgtttgatttccttccggatttccgtcatctgctctatatcctgttccctttttatctcatcaagaactgctcttacttcttcatttttgtaaaagaagcctttggaaagcccggttttcttagataactccgaatcagaaatattgcgtccttccttcgatgccgattttatttcccgaattgccagttccattttgcgctggctctcttaccggtttatttcattcattttatcatactttgccatctgaacagcccctcccaaacagtgttcttcctgggcaaaatattgttccgatgccctggcaattcgttcatcctgccagccaatatattcttttacacgctcatcggcagcataacccatatactcccggattgcctgtatagatgttcagttccggtacaacatcctgcaaaattccttttgatagtcacagcctttgaaaacatattctccatctaatatgccatgtatcaaacattgtttcctgattgcatcgcaaaatccagccgttgtataccttttgcccctactgttcaaatagagataatcttctatctccttttgattgcgctttatgtattttattacaatccagtgtaagatatccgaaaccggaatctttctgtctgcctccggtatgctcatccaactggttccgttgtcacagttaaaatcccttccttttaataaagcaactttccttttgttatccccgtatgaatcaatatcacactcattaccctcaaatcctcaggaaaaagatgcaaattttcctccagcagtcctagtttttcatccagttcttttatctcgtttcgagccggatatgattttttcaagaaatgcgttgttggaatttcaaaatggcaaatcaaattccttacctgcagataagtaataaattttatagttccctgtatcttgttattacagctttgaggctttaatttctgcattctcagatgttctaagtatctccttactgtttgaatgcttatatccgaaatggtcatgtctttttcttccagataacaaaaaactcacgcacgtaggtatgctgaatcctaattatgcctacactttgacgggttacctgaaaaaaatattttgtatactcctgaaatgctgctctattttgcaaaataacaatatctaaaaagctaaatcgctgtatgacgctgccccttgcctgcctctcctggtttatgtttagtccatcaacataccagacattcgcataccatgccggttccttttccgccaaaaataattctcttctgcaaaattcaacaaatttccacgggctgccacaaagctttcctgttttggatattaaccgtgcagaatactccttcacctgagacgtttccattaacagaatgtcgaaaatttttgcttcttctgtatattggaataagtattttaacggaagcaagtattgatttctacgttcctctctgtctttgatgcttttaacaatatgccctaatatccattccacttgcttttttacggtttcacttgcatctgtcgaaaaatcccaaagcaagatatccttatctttctccaaatcaaaagatttttccatacggcctgtaaaatagtctggtaaatatatttggttatttcgcatatccttctttttcatcatgtactttagagattccttcagttaacttagcgcactatttaaaatgtattcttacccactttatcctgtacatcatccatacagagttgtacaggatgatggataattgtcaggaatattgctttccgacaaaacaggcggtttagtaggagcaagtacctgtgttgcctgtcttctttggttaaaggctattttacaatccattgtcctgattttcgactgccaatacgttcaattattcccttttctctcagttcttttataactcttcttgtctgtctgtcagaacggttcaattttgtggccagttgtgcctgtgttatatgaggattctctcttattgctgataaaattattttctctaaagaatcatctaataggtcatttaatgggtcatttattaggacattttgatcttttaaaaaattcttttgtcctaaaggcgtaaattttaccatgatgtcttctaaatgaagtttatattccggcatcggaacaccgtgttttttacatgcttcacatattttttctatcccacgtccccatgtttctacatatcctgccctaaaaaatccattggctatattcggattataaggctgtgagcgatggcgctccatcaatgtttcgattgtccatcctaccggaaatacacagtcattactgatatacattacgtcctcatgaatccgaatctgtattggcactaatgctgcgtaattggaatgaataatcgcattatataccgcctccctgacagccgcctttgggagcggatacgtctcgattctggtgacattgtcataagatatgattgccttcatgtacttcaagtaaatcaattctataaccctgtccgcctgtataaataaggaaccctgaatctcgtcctgatagcgcaggtcagagccttctccaaaatatccgattttaatatacgcacctgtaacccatttctccggattgcggtgaaacaggagaattgccgcacgttttaacctgccctgttcaaaaagaccaaggctgtccaaaagctgttcattgctcatattcaggtcttcttcagtcatacgcccactccgtagggcctctcgccgaaaaatatcaaaactctctttgtctaaatcctcaacagtaactccatcgactggaacagcatcccatttataccctgttttagacagtaaaaactctgtcaaagatgcgcctctgagaagctgctttgtactgccgctgcgataatgatactctcctttataatttactggatagctgctgggattcacacaaatttcaatatattcctttccgtcatgtgtcaacagattcacatccacaataatgccaaggatatcccttactttattcggaatatcttcaagcagctttttactgtctggcaccccaatcacagtaccatcatcatccgttccaatatatattttgccgccttgagcattagcaaagccacaaatccactttaaatactcatcacgccaggattctttccattctgtgttttggttttctgccattcactttcctcccatctcaatttagaagtcataatgatttaacactatgtgactatttttgaagtttaaggatttcacccgttatattgcttccttcatagatgaatacagcttcccactcactccactttgtaatggaataatccgcagcatggatttctttttcggcatctaccaaccacacaagtttcatccctgttttgtcaagataagtatccaagatatctttccgaacaacaacactgttaatttcttgagtcaaatctgtatcgaaagcagctagaattccattggaatcaaaataaaacccgtctgctttttgttgcttcaaattcattgtttcaatgaggttcgcacacggcagactttgggaaattgcactctcttttgttgcatcatattcttcttcccacaacagatctgttgtagcatgaagtattttacctatttttttcttgatttctcgctccctgatttcctctttgaattgaatctctggaacttcgaaatcatctttctcattccaatcatccataacttcttccacttcccactcatcgtcttcagataattcactatactcagacaataaggcttctatcgaagaaaggtctggaacttgcaccgtctctgcaactatttcatactcgccggtttcaatctgcacatccacccaggcatattcattgaattcccgacaactcggtgaccaaggatattctctgttaaaaacagagtatgtttgatgatgggatgctatatcgctcacaataactgagcgaccatttttcacgcactgggagagttcatctgcctgctctggactgacaaaataagcatataaccagctccataccagcagcttatctatatccagctcttcacgtcctgtgtcacaatacttcgtcaagcatatccattttgtttcattatggtcagtcagaatcaaagtatccttcaatttattcaagaagattcccttcgttccaagccacattttctgtgcatctgccgtggaaatatcagcggctttgttttcctcttttcccttagttaagaattcatccaatatagtaaatctgggagcctccttacaaatcataaagctttgattcaaagttggatcaaaatctctaatatatggttcccacgccccctcaaatttaacatcttctttctcgggatagttccaatggtcaaccatcttacaatgatctgaaatacgagccagcatattatacatggtaatccattgatactttttgccaatcctttcagtctttatgctctgatgcctatcgtagctgccgcagtgctgatcatgctctccaaagtattcttcggagaacccaagttcctccagaatgtaatatacagcgtagttgaacatcttcttgtcatctacgtcaaaattatgaagagcgctttggaaaacatagcggccaaaatctccatacattcccatgccttcaaaacgcatggagtgtatcagccaaaacattgctccatcgtaatgcttctccagataacgttggtcttctatctctggaatagggtctgaattgtacggaggtacgattttctttcgttctatcatacctgtatattccgaatgctcataaaggaatcgctcaataatcagccgtgcataatctctaagcaagatatccggatatactttttcctgttcaaacactgtatgataaacatattctgccaaagcctgattgcccctgtcatccgtccgcttacagcaagcaccaaacacaattccatatagccgttgaatgatataaggatcatttaccttctcaaattttctaagagtaatctcgcacagctgaaaatgctccttcaaaatttctatcatagcttttgatgtataatccctcaaccatcgattggatgaagacaagagccagccaaacagagtcaagagcaactctatctgcttttccttcgtttcttcgagtttttctcctctatcatacatctggataagttgcaccagtctatcagtatcattgctcggcaattcgtttatataaattgtccagagataatccctcttattcagattataacttgaaagaaatcggtgaagaaaatctgcattaaaaggatgtgaaaccttcacactatttccaattagcatcggccataaatcctctggactacagggatactttttcagcaactcttcaaaacaatctatcggaatataccggctatttcgccattggaagcaatttatatatcttgaaaaaacctgccatttatcatcagtatcttccagctcatcgattacgtcaatacactcttcaccatatttttctgcatacagtgcacaaacgtttacaaatatatcaatattccaagaattacccagtttccctttttgtattcccaaaattttctctgacagatatctatgcacttcagcttttgtttggtatttttccataattgcctttgcacagtaataatcattcatctggtcaaaagcaaaatataatgtttccactccttcaaagacagaatcatgaagaatatgttcccttacaagatgtcgtacaagcgtaactgcatttaatccatattctgaccaaaaactcagccgagtcaactccttctggggaatagatcgttcatcacgtgacactagccattctgcaatttccatgattaaagggctcaaaatatcatcatcttcggtataacccttttgccttaatacagcttcaagcgctcggtatacatttccattggcatgttcaatcactcggttgtacagtgttggtaaactaatctcttcaccattgtacgttttacaatacagcgtgagaaaaagcggatttgacatttcataaccaaagtattccagcggagtaaacggaatgttataatgattcataaactctcttactgctgtaatactgtcgtcctcaaatcctctatgagtcatggtcacaacgccttcttgaccttccaaaacagaatcaggcaaattcaacttttgatattctggtcgataggccagaaccaatttaaccataggagaccgtttgattttatctattatagacgccagacctgatttccataattttctgttccatgtctcattaagtgcatcaataaaaaccggtacaatacagttgtttttttcaccgatagtttccaagatatcaatcaaattctcaaaactataatcaagttttaagtttttcataatctgctcatggattggatcatcagtaaaataaatgcctgctactaacaacagcgctactcgatcctctcccaaaaggctctgtgttttcgaggccaacaactgcgactttccagctccagctctgccagaaatcgttaatatatctccataaagcaactgtctttctcttttagaaatcattaccatatccggcagtctcttcagcatattcagattatgtatctgactctccaattcttgatattcttttcgtgcttctttactctcttctcgattcttatcattttcataaacaagcctgtacttttcatctatctttttctccaactttttacattcttccgtcagttcatccagaaaagttgtaacagccaaccgtacctcgttattccactgaaaagaatcatatagcgtttcactacttacatctgcaagggttgacaccgcttttttcagtgtctttaaataatttcgtttatcgcttctgcataggaatccgcttatctcatcaagcaaatttgccttctttgcattaagatattctgctgcccttcggtcattgataaacagggaaagttcatccgaaaacaccgtattgacattgaaatcacggttatagcgttctcccagttcatccaacatatggcttgtgtgagttgcaaaccattccggctgaatcgagtagtttccaaaataatataaagcaaggtaaggatatttattccttacgagatcgagaatcgccgtatctgtaatcaattgtatatctatatttgcttttttcaaacattccactgcttttatatatccattcgctgtagatgtaatgggttgattacaaaaaatatatacaagattaacaattccttccttacctgtataatattctaccgttttctctgaggaatgttttatctgcccataatctacatccttatcaaaaaatttcgcttgaaaaccaatccaacgcttattcgtttcatcatagataggctctgtctccagcccatgattgtttgggtttgcatgaagatacataaactgcttatttccagttcgattctcatttgcgaatatctgacggcacaggtcttcaaacttaaaccgaattccgcgtgcatcatgattatatgtagcaaagttttcccagtttatatgcatttcattcccccatttctcatatagtaaacccatatctcagaaataccaagtttattcttttactgatattgacagaaatataatggtccatctgttccatcttttttctcagtctatattctcgttgaatgtcctgactaatacgataatctgaagccttctcggatgttgtttaacttcaataattgcattcccagtagcaatcaaattctaaaaatcccactcaaatatattctcatttttaattcttttaaatgttaattccactttctctctatacctttccataccgtttttatcaagaatctatcactgtactttcatccattcaataatctcttcaaatccgttcgcatacaatctctgaaaattcttcccatttgcgtctgacaaaaaatccaagaattctcccatatcctttctataaatctgccctataatctgaagatccttcgtagcttttgcgattgcttcaaaatcaccaattatgcgcatctgtttttccagcttctcatatttttctttccagaatcctatgtactccagttttgcctctggtccattataaacatccgggtcaatctttataggggcattgcctccataatgcccccgctctttttcacttaatacaataaacagaagtctatccttgtaatgcctgtcttttataatttcacccacctcatacatacacggctgttttcttaaataagtgtcacttatcaccgctaatacaaaatcgtgatcctgtatcgtattcataaactctttaaagcttgctttgtacttaagctcagtatatctggaaatctttatcttgcccggaagcttttcgcaaattgttttttctacaatatcaacaattggcgcatcgcattccgtataagaaataaacagagtaggcggacctttccgttccttttgctccattatctccacatcattatttacaaaaatatattgtgttccgtctgcaagaaccaaatcatctgactgttccactctaatcacgaaaatatttctatcaaaaagaaggaaacttccatgctggcatttgacttcatgggacaattttccatatgcagctttcataatattctctatattggatgtgagataaaaatctgtcaatttataacttccattatccttctctgccccaattaggatgtatccacccgctttgtttgctaaggcacaaatatattttgctaactcccctgggcgagattctaatgctctgcaaatcacattatcgaaattattattactcagtacagcttccacttcgtccctgcttaatcccattcctctacattcctctcaacggtattctgtttaatcctgtcagtttgataatctttccaaatgtaagctttttgggctttgatttaccgtcctcaacccacaattcccagtccatggaatagtccagaatatcttgttcctctcggtaatagatacgcacttccccaccatctgaagggcgagccattagatatatctcttttccattcttttttatagcaaatatcgtatctgataccgtatatatttcagataaatcatactcttctctttgtttcagatatgaaaaaatattggttttggagcgctctaagatagattttacatattcataggtctcttgattatgctttgtaggtctataaaactgctccgcaaaatcatcatcagtaaaagcttgattcagcgcttcttcggactcaatcccatactgtaacaacaccgctggcgttatctcacttcttacatctgcttcctgcgcaccggcttgtcctattcttattatttcctctaaggtttttgcactggtaattgaatatttttccatgatgtcatcaaacatttctgcctttcggatatttgaagtaatctcttcatcatcgtaaagataatgtttgtttttatacaactctgggaaaatttctttcgctttttcattattatctatcatccaaagtaacagttttttgaaattcgaccgtaccatatcatctttagaagttctgtttgcatttacatattgtaatatagacggtactatatcgcagtccttttttacacgattttccggcatctttaaataaacttgtttcatgagtagctctgctctaatatcatatccagccctaactgcaagttcctttaaagtctcatccatatcactatccaaaaagatatcgtcttttatcacaaacattccattttggttaggaagaatcggccttgtcggttggttgattaggttttcataacctgtttgaactataaactcaataaattctgccagaaaacctatcgtattttccatagatttcagtatatattgtgataaatgttctaaatcaccacactcactaatcttgtttgccacacaagtaatcgtatacttcaatgcctcctgtagtattttttttgatatcataggaacttcccgcataaaatcatttgtttttaaaatatcatttgcatacccacacaccttcctctgtatctccaggttttcattgtttttttcacagtagaaaaccatctgaaataaaatgctgctctttactcctctatctgcttcctctaacctagcttcaattgatctaagcatttgtccattttcaacatcttctgcttgaaaccactcccgattcagaatatttgaatcaatcaaccagcttctgctatcagctcccaatttatccaagatatttttgtattcttccaaaatatccttgtcataacgaagttctgaaacacaatgaaatcttcctctttgatctggaatgattctaattttattcgcaaatatatattcttgcaattttttattcttctcgaccagatcatagtacttcaaaagccaatcctgccaattatagtttagcatcgcttcctgcaattgttcaatcccaccatactcctgtaattgtcctgtcaaagtttttaatgtatatctattacagtcactccataaggaaaaataccaatcatgaatattggctttacaaggaatacgttctggcattattggataaagtaggtcccatagttcttctcgaatttccgtgttggtatctgaaataatatatacctgttcttccccagaccagtcctgtaacgccatcatttcatccttactagttcgtacaatatccgtgcttaaaatcgagtccttgcaattattaataaccactttaatccattcttcatcataccaatcccttttttcatacgtatcgatatgtgtaatgtgatagattccaccccagctacgctttgacgcatatgccaatagctttgtatacaaaccacaagctttttctataatcttgcgattttgctcaatttcatcatcgattctagtctttgatttacaggatagatatacaccatctctcggttctgtcggattaaaatcacttgaattaattacaactggaaacggaaaatcctctgtaccaattaatggaaaatcacagaataatttcggcagtccttttgcaaatgatacaaagttaactgaattgttattacattccaatcctgcagatatagtaaccccatcttcagtcaaatttagaatataaatattcttttttgtgattccagattcatacaaaatttcgtgaactaatgtatgtgtttcctgactaatataactttgcttgtaccgaaacatctctcctgttgattccaaaaatatttcttcaatatccctcatcatagataatacaaatggtgcagttactctcaaattttcaattccctgcatagccacttctataccatcttcatccaatacatattcaaaggatgtattataagcctcccagtctggtatctcttgcaaaggtgtacattcctttagctgctgtacagctatttccatggctcttacaatttctttctgctcatgtcccgtccgatccaaagtaaaatggaagtttgaaaagctaccggcctccgtttccagtataccagacaaatctacaatttcagacaacaaatgagttgtcaaaaatcctgttccaaattttccacttgttctctgaatcccatcatttctgtctttagatgaagattgattaataagcgacatcgcatttgttatggaaaatgcctttccattatgtttaaataccacctttttatttccttcatcaaaatcgattgcaattttaactctcccactgttattacatatatcttttgcattctgacataattcccatatccaccgttttgcgctgttttcattattactataacgtagtttctgaagcagttgcagaacacgattggctgctcctattcgtaatgaattgctatctgcctgttcaatatttctttgaaatctttccgtatccattgtatctcccataaaaactcttaaatcaagtttcaccactatttatatacaacatttttcttttgtactaatctttgattcccacatgaccgctttctttatctgtcttaaatataccacatcttttaaatcattacatcaaaaaaagacctgcaaaacacttttctgcaagtccttaaatatcaacgctatacacatttcagtctatcatctgtgtatgcagttccttttttcctcatatttttaacgctatatactcaatatacaatcaaaaccatactccattttagaggtacgcatatacgttccctgtgtcaccggaggctggtgcataacagacaatgtgataccggcacccgggtaatccggatgtgctaccggcagctgctcaatcgcagcggttgtaatcaatgaggaaagcttggaaatctctcgcccgttcttcggaatcagttccagaccgtctggtccgtactgtttaaactgcgtagaatctattaaacagtaaaacataccgccccaggcaatatcaaccttaactttccccacatgaggaacatcaatctccgcatccagataaacaggaaatgccggtacattttcaaagctgaccttagtcacctttcgtctttccatatcacactctgcaacaatatgaatcaggccggctggagcctccagattaaactctgtgacaggtccagtcatctttacctgaccggtttccagcagggcagttgccaccgcaatggtattgccgccgctcatcatgggatactctacctgctccataatgatatatccggcctcgcagtccggtctgttagtatttttatagcctactgttgttcttatatcttatctttccgggtacctattagcaatatcagcctccaaggctgggaaaacgttttccattttgataacagtatatcttctaatccttctctcgtttacagattcacgtccaacatcatacctgtccttagctggatttgaagtttgtttttcgatatcacacgtatctcccggacgatctgccgtatgaagatattatcaaattcggctcctgaggccccgcctgtttcacctatgattcggctgatttcctggtccagatactcatactcgtcccttatcttttcctgctctcgtatgctttctctcctcttctttagttcgcttatctgtaatcccagctttcgcattcggtcgctgtaccaattctcaccaccatgttccctggctgccatgcccacatagtccataagctggtcacgcagttcctctatggttttatcaatctcttcctctgtgcaccctcctcctacaaccttggccgcccggaggatatcttcctttaccccgtttaagaagttttcttcctcctggtcaattgacaggctgtgcagctttcccatgattgcttcctgaatgacttcctcctttaacgtaggtgattcatggcaccgcttcgtcccatgctccagacggttgatgcagcgccacacgattaccttcttcccattttttgcccaggttgtcctgcggtaatgggctccgcattcattgcacaccatgattccggtcagtgcatatttagaactatatacgccctgggccgtctttcctttcctggttccggccttttttaatgaggagcgtctggcaatctcctcctgtatcttgtaatagactgtcttcgggatgattgcctcatgatgattcttcacatagtactgcttctgctggcccgagttctttactctccgtttggttagataatctgacgtgaatgtcttctgcagaagcacatcccccatgattttttcattgatcagtatgttgtagatggtacccgtactccatgttttcttaccggtagttgtctctatccctgcctcctccagtctgtgcttgattcgttccaggctgtccccgtccagaaaccaccgggccatgtttcggataacagccgcttcctcctccacgatgcacatctctccggttggcgccttcctgaatccatagcttctctgtcttgtggattcccccttttcaaactttctcgcatacccccacttgacgttggtgctgatagcccggctttcctcctgtgcctggctgctcaggatagtcagtatcatttcggttgagtcatccagagtgttgaggttttccttctcgaagtacacggccacgttcttttccttgagcttcctcacccaggagatgcagtccaccgtattcctggcaaaccggctgatggatttcgtaatgaccatgtccaccttccccttcagacactggtccatcagctggttaaaatcatccctgcgaaaggtattggtcgcgctgcgtccatcgtctgcgaagacaccggcgaatatccagttgggattctgcatgatgtgcctggtataatactcaatctgtatgtcgtaactggactgctgctgttccagctccgtgctgacacggcagtatgccgctacccgcagcttccgaatttccccggccgactcatccgtcgggttccaggttgccgggatgacctccacgattcgttccgcccttggcatatgttccctcctttccaggtgatatcctgttacggctctcccgtttcattcgtccggtttcttccagccttgtctgtacttgtgcaaacagttcccgcgtcaccagagcgggaaatttcttgttccccagataaacagggttggtgagaatattgcggatgcagctgtggctccatgccggctttcctttctggttgggtatggactggctctccaactcgtttgccaatgctgtcagcgacatccctttcgcgtaggattggaataccatttggatgatagggccgtattgttcatgagtgattggcacttcctgtccatccagccagtatccgaagggaacgcagtaacgtatatttttcgatttcttatcttttgtttttatttctggatattgaagtaccaccgctctatttatcagctcaaatttcaggcttctgtccggctggacctctaccctcttgatgattttgaatacggatgcatcaattgttttaagcgaatcaattgtagaaacattcacctccagaagatattcctctatctcacgggtcaattctgtcatctttatctctcggtatctcctggcagcaatctgaaaatagagttgctccatcctttcatcgtctttattgcatcggttccagtacccatttaattcagattccatgcgctgtttttctttgatgattccagtcagtatctttttcgtttcctcttgatacagagttggctctgttttcatccgcataagtgcttgtaagaatattccatccaactgcttctctgtcaggatgggcatcttacatggttccttcgtggccgggtcgtaatgcctgcatttccaataccggacctttctcctgtcctccttgccactctgcttatagatggaatatacccctccgcagttgctgcatatcaaccggcctgtatacatggatgttctctggatggagccggttgggtgacgctggttccataaatcccgggagcgcttcagatgttcctgtacccgtttaaactgctcttcttcaatcatccttgggtacggctctactcccagatagtccttgttacgcaatatttttcggataagggctggtgtccaggacggtttttcacgggcggtaggtgccttgctgtcctttagcatccttactatctttttgatggattctcctccgtcatatgcatcaaagataaggtgtacagcttcactctgctctggattcattctcatgtctccgtcaaccagacggtacccgtaggtgatatagttgttcacatggcatccctcctgtcataggaccggttcatataggttaagtccgcaccgcagatggaagcccagttcccgttcctttcccacagagacttcccggaccaggaggataaactggtcaccatcgaacgcctgcatcttcccatcatatccctggagctgatgcagggtggcctgtaaccctgtgatggtatcctggtgggtacctctactgtgcagctgtttctcttctgacctgcatctgcttagctctcgttcaatcttccggctctcctcaaaataaagagcagagtcgatacactcatttgcttttaactgcctgagtatatgtctctgctcttttagttccagtttcttttgatttaaggtacccaatgcctcatgaagtccattggtctcctgcatcttcttcatcccccggataaccgggtctactatctcgtccgcgtgctctttcagggtgttgaatgtatttacaaacattctttctatatccgcttcccatatctcattggtatagcactggcatgcctctgaccggtggcccggacatctccacttgatggacactccctttcgtctctgctccttcttacggatgaatgttttcccgcattccccgcataccaccttcccacttaggatataagcttccccactcccacgcgggttcatcttggcctgtctgccaagacggtgctcctttatctgttgtaaccgcatctgttcatccctgcccaggataccctcatggtcttcccttataaaatactgtgacttcttcccacggtttttctctgtccggaacggcaccatcccggttgagtaagtcttctggtgaaggcagtcacccactgttttctcgttgaacagaatccgcaggaccgcttcggaggaccagagcccaccatacggcgccggtactcggtttccattcaggtattcggctatcctcaccccactcattccgttcatgtacatactggccatcctgcggacccatactgcctcatcctccttgacagccagctcctttgcttcatccttatcgtagccatacggccgtctgcttatcacgaatgtaccatgccggaaccggtttaccgctgaccagtggacgttttgggagatgttctctgactcctgctgtgcaaccgcaccgtatacggtcagtatcccttcactctcctccgtcatggtattcaggcgttccttctcgaaatacacacttacccctatttccttcagatggcggaccgtggataaggtgtccactgtgttcctggcaaaccgggtgattgatttggtcagtatgaggtctatccttcctttttcacattcctccagcatccgccggaagtcctccctcccccatcggctggttccgcttatgccatcgtccgcatatatcccgcagaattcccaggccggatttttctggataagtcctctataatactccatctgagcgtcataggaatgatactggccatcggcatccgtgctcacacggcagtatgcacacacacgaatgcttcgtatctcgtatcctgcatgttccggtttggcctttgggatgcataatacctctgccacttgttatacctcctttcctccgttttcaacaagacacattaccacacttcctgcaccatatcaagtatcagttctccaaattttcacattttcatacaacatgttgggaacatatcctctggtacttccgaaggaccatgtcatacatgacggggtcaatcagcctttgacgcagcagctcatccagtatcttttgtacttccctgaatcgcaggtattgaagcagctcaattgtttccatagttcctccgggaatacgctatttccacctcacggatttcttcatgtgtatcgctcctgtagctgttatgggaatgcccatctgtaacaccttcatccattctggcctcgttccattccacatccatgcagtcatcccggaagaacggctgcatgatctggcatcgaacccaccttctctctgtctcttatttgtgcttctatttgacactactccccgaagcttgtccagaaggatatttggacagggcagccagtccgcctgcctgcagcgtacaggcatcataggaattccacctcctccgggttctccgggggccgccctcattgcgtggtccccggccaagggggctgtgactggacggaagtatcattgtcagctgtccgggattatggcgattcaaccctgcttatgattgattgggagtcgggtgtgtaccgctcttgccttaagatgtattgcacatccatggacaggatcatgtcctgcaggcagtcttcgcgcacccctcatgtcgctttcgttcctcacgaccggacagccaatgtaacggattggctggatatgaagttgtcaatgtacggcagacggcatactcccgttcttttattcaggcctgtatgaatcattttttcttttgtggattatcatatatccagtcgagatggaccggttataccccattctctccttccatttcgggttttcaaaaaatacccctctactatttaaaagccgaaaaataggcctactgataaccaacaaatttaattttcaggattatacacaatgccctcctgaaaatacataatattttactgttgttgatggactgatgtttttctttacacatgaaaggattagccagttcctcatccctgtaccattcccttctaaaaaaacatccctctactactagtggtaaaaaataggccttctgataaccagatttcttcttacgattttcttaagatacacaagtccggcatacaaccaggcttgcagattacatttccaaaaaaatatccctcactattagtccagtttcagaccccttttgataacctcaaaaagccaatttcgttaaaagtgcacatacaactttagttatttttactcagtttatcacgcctcaaatggtttatattctttccctctgtactagatattccattgggtacttcttggcgggccaccatgggccagggcatggcccaccggatagacagactccacccttggcgtggcatatatttttttgtacgggtactgcatgtatttgatttttttcgcctcgtttttcctctctaaacaaataaaaagccgccacataatatgacggctgccctcaaaacatactatcacatatcctgaatcatcttcatcaatcgtatcccatccttcaccccttcctcatacagatacaactgacacatcccatttccatccagcatgtcatcaatacaatcctctatggcctccctctgctccttggtaatttccttcatccaatggtccatccgttcgttcagcttgtggtctgctttcttttcttcctgtgtcttttcttcctgccatcgggttaccagccattctaccctggctgctatgacttcctcacattgttccctcgtagttttcttcatggacactcctccttccgccaacaccatatcgaatatcccggcggaagtccatatccacatgtcataaagattctgctccaaatacgtcagaaccacctacagggtgcacctataaatacgccattttccttgtacttgcgtggtctccagccaaaaccgaccacctgacaggtgaccaaggctccaaacaggtgcacctttgtggaagcagaaaaacgcccgcattgcgggcgattgtggccgggaggggcgcctttaggtgcacctccctttaacctgcacacaaatcgaacggggcatacggtttgatttatggttgagaatgtgaaatatcgatatcggttttctttatacaaaagtagaatttttttatattgggccaaatttgccggattttttattgtatgcccatctatcccattgctctccttaaaagccagcacagtggcttacgatgcgttacaagggctaattcaagttgctttagctaagttgattttttacttttccctaatctctaaaacacccttatatcaagcccacaacaaaaagtaatttattgcggttctatactgaatgttggggtgtgttaaaaagtacacggtaaatcactagtaccgtgctagttacctggttccatgagataataactccagaaaactacaagtttttaaggagttagtgccatggataaaattacactcaggtccgtgaagagcactgggccagaatcttaaatgaatgtatgaacagcgggatgtcgaaaaccgcctggtgtcgggcaaacgggatttctgtgaagcagtttttttactggcagcgcatcctgcgcagggaagcctatgaagcatctcagaatccaccattacctgcagttgcagagacagaaccgttgtctgctgttcagagaacggtatctttcgccgaaatcaaactccctgctgtgccaccagactcgtcacccgttttccatccggatctggtgatccggaaagggaaccttgttctggaaatctcaaattcagcctcatcagaattgatctcccgggtaggagggattcttcatgctgaataacgcatccggcttccggaaggtttacattgctgccggttatacagatctgcggcgcgggatcgatgggttggcatccattgtgaaattcaacttccagctggagccctatgaaaaggatatcctcttcctgttttgcggaagacgcagtgaccgcatcaaggggctcatatgggaaggagacagattccttctcctttacaaaaggctggagcttggcagtttcagctggccccgtacaaaagaagaagcactggagatcacactggaacaataccaggcactgatgcagggcttggagatcgtgtccagacatccaatccaggaagtgcagcccagtgatcttctgtaaaaagttgtgcaaaacggagaaaataaaaaatctttttgtatctactactgcagacacggcggaagttatccacggccgggtctcatcccattcattcaatcaagagtacttcacagctataagctgctgtgtggataagtactctgaaaaaccgaaaaaactattagtttttccggtttttcagagtgtttatcctttggtaagaatgacgaaccttcttttttatcccgttcgctttttcttttggtttgcggtacaatagttccagtaaaacaaaggagcgccgaacatgcagaagatctacttaccggaagaactaaacagtttcagcagggaaacactcgtggcagtgctcctgtccatgcaggaccagcttacccaactgaatacaaacatggaacgtctgattgagcagatcgcgtctgcaaacaatcatcgttatgggcgctcttgcgaaaagctggacgttatcgccggacagttggagctggagatcatctttaatgaagcggaagccttaaccgaaacgctttatgttgtcgaacctgcagaagaagatgtgattcaggtcacgcgccggaagaaaaaaggaaaacgcgaggcgaatctcaaggagcttcctgtggaagtgatctctcatacccttccggaagaaaagctgcaggagatttttggctccgttggctggaagcagctcccagatgaagtctataaaagagtccgggttcagccggcagtctacacggtcgaagaacataccgtttccatgtgttgcaggccgatgagactctggtcagggtatcgaaggatgggcgcccggcaaacagcaagagttacatgtgggtttaccggacgggaaagggatatggggatacacccattatcctgtatgaataccagaagacccggaaagcagaccatccgcgggaattcctgaaaggattcacaggcaccgttgtctgtggcggatactccgcctaccggaagctggaccgggaaagtgagaccatcgttttcgcagggtgctgaacccatgcgagaaggtattttgccgatgccctgaaggcattgccgaaacaagatcatcaggcagccaaagatacggtcgcttacaaggcgaccaagcggattggcgccatataccatctggacacccaactcgctgatgaaaccggatgaccggaaaaagcaacggcaaatcaatctcaaacctctggtggaggctttctttgcgtgggcaaaagaaatccagacttccggtcgcctgaccaagggtaaaactctggaagggagcaactactgcatcaatcaggaagaggcattaaaagtcttcctggatgatggcgaagtcccgcttgataataacgcaactgaagggtcactgcgtagcttctgcctgcacaaacatgcatggaagctgatcgacagtatcgatggtgcacagtccagcgcgatcatctacagtatcacggaaacagcaaaggcgaataatctaaatcccttccgctatctggaatatatcctgaccgtgatgaaggatcatcaggaggatacggattatcgttttatggaagaactgcttccctggtctgagcagctgccggaaatctgtaagagcaaaacaaaaacaacaaatgtgtaaactgaccgccggaaacggcggtcataaaatgagctggtactcatggtctaccatatacggtttttttgccgggtaccggctatgaatcacttacacccccttcctgtccatatgctagggttgggggaaaaaagcctctgataatagccagatactaaaccgtccaaaaggaagcaatactgggaccagctctgcactgggagcaagtttgtgttgagatgaccgcactgtgagtaaggcgttaaaaagcatatgccgttatgtgtaaaatataggcaaaatatccgccgaaagaaattgtgtattaccgattattttggtagacagccctcatacatgatgctatacttaccatatacctgtccacaattacggatgtgcattgaccatttttttgtagcctctaaggtagagctttcaatagcgatatatcgcttgggaacccactactctgacggttcagcttgtggtaagtggcatctggctctctattgcgttggtggtatggatgaccttcttgattgctgtggaaaacttgaagatcgaggaaatagcatcccagttttgcatccagttttgcatccagattttcattgaattgagatattttttacacttttttagtcacccatattggcgtttcctctcattattttatgcccatgtcaatagcatgtcatatttcatgataatgtaactatagtatgctgttatggagttttcaacttggtgagtctattctattatctcaaatcatatagaaggaaatccatacattatatgaagcatttactattgtttagcttcacctttgcacgattattccaaaatcattttattcttattctggtataatagtgttcattgtctgtatgatgaatatatgcattattatgtagttgaacttttagcgaggctatattatctaatcttgtagacatataaacttcatcatcaggaattattttctttgcttcatcaattgctaatgctaagccactagaagcaaaccccattcttctaaaattacggtgaatttgatatccaatatgaccagaaccattccttaggctatcatttaaaaaatgtctcaatctaaataaccctactatagttttttcatcccataaaaaataatttgtttcaggtacataaccacttggaaggtctattccatttgaatagttaattagtttaggaagtgaaacttccataaactcctctttagaaatattatgaagattgtttataaatccattttcattcaagggtaaatcctttaaatataaatactctagttcgctatcgtaggtattgagtttttttaggtataacatattattttctccatgattactataaataggtagcattaatccgtaattagtataattagagatgtttaggaaaaaatgaatttttaaagagctgcccctaatgaaactacaaagcgttgataattatcgatttcaattttaccttttttaacatcttttgttataagatatggtccaatagatagggcgtctaaattagttttttcaaaacatttcagagcatccataggtgtttcaactataggttctccagcaatgttaaacgaggtattcaataatataggtacacctgaaagcttttcaaactcatctaaaatattgtagagaactgcattttgagtagaggtaattgtctgaactcttgcagttttatccacatgagtaacagccggaatttcattgggtttaaggacatttgccactaacaacatatagggactttcagctccgtgcttgggcagctcctccaacagatatttgaaatactcgtatggcttcaggttattcgctttggcagtttcagctatgctgtaggcaatggcactgctctttgctccgccgctcgtatcaatcagataccaattcttcctgcccagagtaaaggggcgaatactttgctccgcagcattgtttgtcatcgggacagcaccatctgtaagaaatacccgcagaaacgattcctgattgatgcagtagctgattgccctgccagtcttcatttttggcgctacgtgaccctgctcgtatttcagatacgcaaagaatgcgtcaaccaatggggcaacgtttctttttcgctgttccagacgctcttcgggaggcatatccgcataaccctgctcataccggaacatggtctgtataatctggagcgccttatagcagatggactcctgaacggaccctttttccttaccggcagacttcacaacatcggcaaagtcccttctggcatgtgaccagcatccggcaatcgtaaggtcgttccgttccctcgcgattgaatggtatacctcatatccgtccgtcacgcagatgccactgaaatcctttagaaactgtctcggataatccgctttgcgtcctttctggtattcataaaggacaaaaggatgtgcttccagtgatccggtccggtacacccacatataactcctggatccggcagggcgcccatcctttcgtacttcaactagtgtttcatctgcgtggaggacatgatagtcattgagtttttccctgagacggtcataaatcctcttcaggtaacggtctgaacagacattcgcccagcggcacatggtcggttccggaaggaaaacgttacagcgctcgaactcttttaccagtcgctggattggctgtgcattgacatacttggcgttgtagatacctgcggcgagggaaggcgtcacgatgctgtttcgcagaagatcagcgggacgctcaccacgcacgaacgtcctgccgtccgtgctcacaaagacctctacatgatgctcgattacctcaaaggaggcgggatggaaagccagtctcttataaacttcatcagggagctgcttatatttcccatctgggaacgctctctggagttgtgcttcgcagacgggatggctgactgtgcttacgggcagatccttcagttcttccccgcgttttccaatcacctttttcccgcgtttataagccttcgagtggatttcttcgaaggtaggttccaggatatccggattcaaatcaaccgtcatctcggtttcgttaaacatgaaaccaagctggaagtgaccctccgcttccgtcaggcccttttcggaagaacgaccaaaccgatgctggcgcagatgaatgacctcctccgtaaggatatcaatactctggctgagcttctccacggagtcctgaagtcccagatacatcttgatcaatgtttgtttgtcaaggtttgatagttcttgttcgtccagtcttaccgccatcgtccaagactcccccttcctgaatttcatttaggaaagtataccagaaacgctcgggaaaagccactgattgatttggaaacatttccaatttagaatacttgtgtgcagttgaccttttttatggtcggacgttccaggatcgtcataccatcaagaagccgctggagttcagcctggctgagctgcacagcttcctgttgactgcggggccatcggagacggccggcttctatgcgcttgtaaacaaggcagaacccatcgccttcccagaccagccctttgaatcggtctgatctggtcccgcaaaaaaggaagaggacatttttctgaaaagggttaagattgaactgttcctttacaagagcggccagaccatcgattcccttgcgcagatcacttttacccgcatagagataaattgcttcgaaaccattcatcttagacaacatcggtcatcaccgccttaagaaaagcgaggatattgtctggcgcatcaccgctgacttcaatgacggtatccgcacgacggattcggagagcaacagcggaagaagggtccgcagggcaaaagggaacccgcatgaatccaccggtatgttccatggacgtctggcctgccgcagccagcgctgtattgcgcagctgcctgaggcgatagtaatactgtgactcactgacattgtttgctgcgcaccattcttcgatggataggccgctggcactacgttcttggaccatggctttccaactagccatacgtacttcgacgacctcgttcatagagagtagcatcctttgagttacttgaaaaacttctaaaagttttcaaagtttttcaagtagattcttctaggagcctattatctcacagactggggctctaatcagcctactcattatgaatcacttacaaggcatctatttctcacgccctgaaaaacacccattttcaggccgcaaatccactcaattttccctcaaaagccactacatcttgtggttttatccttcatttttctccaaaaccacaattcgtcatctaaactaccgtagcttaatgcctatgcatcgaaaactcatccataggatacttcttcagattctccagcacatgcctctcctcggcagacccaatcagctgttccctggccttcttggcctcggtctcagttttgtgccggctgggaccgcccacgcagccgcctacacaggccatgccttccacgaaatcttccggaagctttcccaccttcatgagcagcaatgccttcttacactctgcggctccgttacagcgggctactttgacatctgtgttttcatccatttccttcaggcattccagtacggccgctgtcacgccgccgccgttgccaaaacgctttccaaacacagagctttcctgataatcattctcggccggctgaagctctactcccttggcgcgcatcatggctcttatctcaccaaaggtcatggcataatctgcatttccctttacatttaaatccaggctctcgctcttcttggctatgcaggggccaataaatacagtaaccgtatccggatccccgctctttatcattctggacactgcgcacataggcgacaccgtggtggacatattctccagtaacattggaaaatgctgcttaatcatgttcacgaacgcgggacagcaggaggtagtcatcttctttccctccttatgggcctgggcccattcttctgcctcataggcagcggtcatgtctccgcccaatcccacttctatcatgtccgcaaatcccagctgctttaatgcaattttccagctggccatggtaatgtcagggccgaactgcccctctgtggcaggcgccaccatggcaaccacccgttttcctgccttaatcaggcgaatcacatctaccatgaaggtcttggaccctatggctccgaacggacagctatggatgcaggctccgcactggatacatttcttctcatcaatcacgcagatgccatactcatcataagtgatggcatccaccggacaaattttcttacacggacgctccagatgggcaatggcgttatagggacaggcctgtgagcacttgccgcattccttacatttgccgggctcgatataggcccgctcacgtcccatgctgatggctccgaaattacaggagttctggcaggcctttcccatacatttacggcagttgtcagtcactatgtaggatgcaatgggacactcctcacaggcagcattgataacctggaccacattggatgtgtccttcccggttggacattttccttctgccaggcggaccctctgccggataatttctctttccttataaatacagcagcggtaagtcgcctgaggccctggtatcatggaatatggaatctgctcccgcttctcgtccagattcccttcccatgcagctttagccacctcgtaaagtacatcatgtttcaaacgcaggattgtcgcatcattggttaccatctttttctcctccttgttacgggcacttggagaccgtcctatggtctcctgcgcattacatatcattggcttatcccatatatgtctgcttctatatcacaattcgagtttgttaaaattatatcaacactagaaatctactatatttaccctgaaaaagcaagtattaaatgacatacaacattagtaatatgtcaccactactgtctttcccatctcctcaatcacatgcctcagctgttccaccagattctggcggatacccaggtcaaagggaagtcccggattctggtacgcactgttgattgccttccccacatacaggtgcacctccgtgcagtcctctatgagcaccttggccaccatagaacccccgttgggcttatccaattcatgaaaaaattcttcggatacagtctcatttttcacatacctgcggagcagctgaagtacccggttaagggtaagaactccctccgtaaccaaatccacaccttccatgtatgcaatgggaggtatctccggatccacataatccagtgatacatccagtttcttccccagcaccctggacacgatagtggcgctggttcccccgcatacaatggtcctggcattgggatcatccataaaatcctggaccatacgaacgtcgtcttccggattccttgcaggtccggtcatgaggtgaacaggcttgctgtcaataatccgcatgcacgccaccgtagtatcatcccctggacggaactgatacagctcgtcacaggccctgctgatgctggcggccagacgcatggccgacacggtcagaggatactgtctcactgcatagtccgcaatgtcctgccacagccatccaaagttcagcagttcacccacccctgcatggatggtgccgtcgctcatgagaatcagggcatcgccttttttgaccttgaacctatattcattgatttccttgccctgcatgacccgtacatttttcggaatctgcataagcttaccgtcccggataaatatgcatccgggattatcatattccaccagatacgcatccccgttgtggtatacctgcagtatgctgaaggtggaataagccacctgcctgacctgacagatggggagagtctcactgatggtatccacacactcctccagggtagccccattaaggaacatggttcccaatatcttagaggtcagcgtggacaggatattggccttgactccgcttcccataccgtccgccagaatcataatgttggaatcctcggtctgcaaaagctctaccttgtccccgcacaggatttcggtgtacttgttcaggcttttatatgcaacatccactgtaattcccattatttacctccgttgccgcctggtttctttaaatccacattgctcagatggacatacccggactttcccccgcccggattggcgctgcctatatggacataccccgtaggctttttctgttcaccggcattatctgccggattcccggctcctgatgccggctctgatgccggcccggttcctgatatctgtccggcttccgctccgccggagcccccggctgtcatgacaccctttaagggcacggctccgcttcccagctgtacgccaggaatttcccgctctctttctcccccggcatacccggcatcgctgccatcctccagcaaggagtggcacagcttggtcagggtggtttttgtctcggctgttgtctctcccagcagacctgctatctcctgagccaccatcatctgtttatggatgaccttctgggccagatctatggtttccagctttctctcatattcttcctgggccagctcctcctcacgggttatgtctatgaaggtggccaggactgcattttctttttctatgtacacaatgttctgcagggtggaaagattatattccggataattcacccgcttgccgtggatgttctggtgtgtatcaaatacccactggaagttcactgggtcgataagttcatacagatacatctgcaatgcctgggaacgagtccttccaaaatatctctcgcccacatccgagtactccatgatgcgcatgtcatctcccacaatcagtacgatgttgggtgaagtctccatcaccaggttggccatggattccgccttttcatgcataaacgggatacacatgcttacctctgccttgtgctggaatacggcaatggccttttcacggcaggtagggtaaccgcaggcgccgcagttcagctcatcctccggcttcagcttgttggtcattcgcaggatttcccgtatctgttcctccgtaggctgggggtccctgggggaatggtcctcgaactgcttcctgaaattcacattatcccataccggctccatctgcgtttcctcagccggctccctgcagatgctctcctccatgtccagcttaaccttaaacctggatataaactcctcatctaccgtggggcctttgatgcagccgccggaacacatattcatctctataaaacagcccttgatttctccccgggacatactcttgcacaaatcaatacaattgtcttccccgtggacatagaactttctgtatccatcccccttctcctcggtagccagcacggaattcaccacgccgttggtcacaggatacaggcggtttacctttgggtcaaatgcggtaaatggccggtcttcacagtccccgattacgatgtcttcttcctccagccatttgtttatgtcattaaaatttaatacagcatcaatatagccctcatgcctcaggtccatggcttccttcttcttggcaatacacggtccaaggaacacgaccttcacatcacgtccaagttcttccttcaaaagctttccgtgggcaatcatgggagacacaaccggtgccaggtagggtataagctgtggatagtagatttccaccaggtcattagcacttgggcagcatgtggttataatattctccatcttgtgctctgccagaagcttcgtatactcagccgtcacaaaagcagctccctcggaagtctctctcacatcctcgaatcccaggcgcagcagagccccccgcacctgaccgattgtcttgtattttaataaacccatataggacggtgctatggacaccaccacacgcatgccttcgcgcaaaaatccgcgaaccatgttcaggtcgctcttaagggtttttgctgactgaggacagatcttcagacagtgaccgcacaggatacacttgtccggcatgatgaccgcccgctcatccttgacctggatggcctttaccccacagtagcggacgcatttatagcagtgtttgcactttgtggctttgaaatctatgatttccatgcccataatcaaagtctcccctttatctcattttcaaaaaattcttctgtatcttccggcttcagggaatacagctcgccctccaccgtcacgcacactccatggtcacaatttccggaacagaacgcaccgtttaaatccaccttatcagacaggctgttctcatccaccagcttctggagcttgctgataatctctctggatccctttaaatgacaggcgcttccaatacatatcgttactttcatcccttattcctccactatctgcgtgtattatgggctcaccccaaaccatggcttcattatctcacattgtgatatttatatcaataatatttctcaaatattttatagaaaagacagggctgttgtgctatagttaatgatatttacgagaggagttgaagtactatgaaaaaacatgtttctttacttttaatagcatttatgggtatctccctggtgctgggcggatgcggcaagagcacctcaggcacacctgccacagaggctcggacggaagcccaggccgggacacagacggaagctcaggccgacgcacagaccataaaccagaacggtgaaaaagcctcccagaaccaggcctcagaaagcgcttccggcgcagtgtcctcctctgaatccggttccggcgatgaactgaacacgggttttgatgaaaacaagctgacctgtcaggcagccatccgtgtaggctctctaaaaggccctacctccatgggacttgtatccctgatggacaaggcttccaggggcgagacctccaatgtttatgaatttaccatggccggcaaggctgatgaactggtgggcaagattgcaaacggcgatctggatatcgccctgctgcctgctaatgttgccagtgtactctacgccaagacccagggaaatatcatggtcctggatatcaacaccctgggtgtcctctatgtggttgcctcagatgattccatttcctccatggctgacttaaagggacgcaccatttatatgacaggaaagggaaccacccctgaatacgtcatgaattaccttttaaaggaaaatggtctttctacatctgatgtggaccttcagttcaaatccgaggccacagaagtggcgtctctgctaaaacaggattccagcgccatcggagttctgccgcagccctttgccactgctgcctgcatccagaaccctgacctaaaaacagtgctggatttaacagaacagtggaacatgctgaacaaggacaccggaagcatgctggtgacaggagttaccctggtacgcagcgattttctcagggaaaaccgctcccctgttgcagacttcataaaggaccatgaggcctccacactttttgccacagaacatgcggaggatgcatccaggctgattgctgagcagggtattgtggagaaagcccccattgcccagaaagcccttccctactgtaatattgtatgtctgaccggtcaggagatgaaggacgcattgagcggttacctctccaccttacatgaacaggacccaaaatccatcggcggacagatgcccggagaggatttttactatatgccctaacccctgactgcggagacatcctttatgaatcaacctacaaatcacatcacacgaatacgtaaatatctggtttggctgttctggattgcagtatggcagacagccaatctcctgatacacaacaatattatattcgtaggccctctggacatggtaaaggccctggcagaacaggcagcggacccggccttctgggccaccatcctgaattcctttgccaggataagtcttggattcctgggggcctttgccctaagcatcctcctgggaagcctggcctacctctttcccctggtaaaggagctgctggacccggtcatgcttctgattaaatctgttccggttgcctcctttgttatcctggcactgatatggattggctcccgcaacctggcagtattcacctcttttctggtggtggtgcccatggtctatgtgagcactctgtccgggctgaaacacacggataaaaaactgctggaaatggcccgggttttccgtatgcccatgtggaagcgcatccactatatctatgtgccagccctccttccataccttgtaaacgggtgccgtacagctcttggtatgagctggaaatccggcgtggccgcggaagtcatcggcataccggaaggttccattggagaacagctgtactactccaaactgtatcttgacacggccgggctatttgcctggacctttgtcatcataataatcagcgcattgtttgaacgtttttttctttatctgctaaagaaaataaagcattaaggagcgtgtatggaatgaccctggaattgcaacatatatccaaatcctatgacgggctgcccgtattaaagaacctaaacctgtcctttcagcagggccaatgttattgtctcatgagtccatccggttcaggtaaaactactctgctgcgcattctcatggggttggagcaagcagaccatggcttgatactggcagacggaaccccccaggacatgagttccctgcctgcttccgctgtctttcaggaggaccggctctgcgaatccttttctccgattgaaaatgtagccatgtgtgccggccggtcgctcaaggctccccgtattaaatgggaattggcccgcctgcttccggaggaatgcctgaaccgccctgtatccaccttaagcggcggcatgaaacgccgtgtggctgtcgcccgtgcccttcttatcccctcccatattcttctcatggatgaaccttttaccggcatggatgacgaattgaaacgcaatgtcatttcgtatatcagggaaaaacaagacggacggcttttaatcctctcaacccaccaggaggaggatgtggaactcattggcggagagctggtgagattggaaaactgtatggacgtatgatatgtacgatatacattaaccgagccaaagaaaagcgctgcagcccatggtttttcccctgggcctgcagcgcctttcacatataattctgaatacaattcgtataaacagcctgattcagtcacctgcgctggtacgaaagaatgaacttacatctgtctcatctggtcctggcaggatggtgactgcatatcgaaggcagggttgaacgcatagaaattcctgctgtccagcttctcctgggtgatacgcagcagttcaccgaatctctgataatgaacgacttccctttccctcaggaatttgatgggttcacagacgtcataatccttcacaacgcgcaggatattgtcataggtgctcctggctttctgctctgcagccatatcctcatgaaggtccgtaattacgtctcccttggactggaactcacatgcattaaaaggaattcctcctgccgcctggggccagatacctgtggtgtgatcgatatagtaaggtccgaagccctgctctaccaactggtcggcagtcagtccctttgtcagctgatggataatggcagccacgatttccagatgtgcaagttcctccgtaccgatatcggtcagggttcccttacactctttatatggcatggcgtagcgctgggaaagataacgcatggaggcgcccatttcgccgtccggcccaccggatgtcaataacatatgatatttcaagagtttatacgactatgctctcaagagtgtatatattaatatatggaaggccagaactcgcttaccgctcaccctcctctcttttttctccgtacctttcctaaatccgttttcaaaaattctagtacttagttggcgctcgctatggcacgcctctattataaatatgctctatatcccactcttcttttattactaaatcttcattcgaaaggggaggggactaatttaatctatttatatcttttctaaagtgcttatgctataatattacattatatactttggagaaaatgtatggacgtacaattaaaagatatttttgttggtgacccagatggtttagcagaagcgcaaaaagaacaatttaatgatctattctataaaaagaataaaaaatatgaagaattagaaaaaaatccaagtaaatttattgtaactggtagaaaagggactggaaaaacactacttgctaaatattacgaattgcaaatgaaatctgaaaagggaattgctaaatacatagataaagaccaagttctttttcggcaactccaagcaatcggaaacggcgcagtccctcaaagagaacgagcttctttcattacgtatgctatactaagagaaatctctagccttttatgtgatgaagaaagaactattttaagaggaagaggattttgggaaaaaattaaaataaaacgtaaatttaaaaacttaaaaaaaagaatcgataaaaataatatacttaactttgaaaaaaatggaattaaatatcaagacgagagtgctttttccggcaaagctaattcttcaaaattatatgaactatcagcgcaaagaaaattcgtaaatgaagaaaactacacccgggaaccctattatgacaaaattgaagagttaaaaaaatcgctttttgaattgacctgctataaaaaagtttcaataattattgatgacttagatgaatatgacgaaaaaatagcaactaatacaagttttgcaaaatttttatcaaagtttattgaagtgtcatataaattaaatttggatttaaataaagtatctcctggtagtaaaattatcctactttttcgctcagatttatttaggtttcttcataatgattctacaaacttaaacaaatatgttgtgaattctcaagttaacttaaattggttaaaagatagtaatactagccaaccggaaaaacatatactcatagatatgatatttaataaaattcggacatcaattcctaaatggtatgaaaaaacaaatttggaattatatgaaatgctttttccagccaaaatcaaaggaagagaaacattgaaatatttattaaattatagccatggacgtcctagagatattgtaaatcttttaaacaaaattatatataaatatcctgatgcttctaaatttacaaacgagatgtttctagcagttgagcccgaatattccgctgatttctgtaatgaattgcgtaatgaaatatctttatattatggttcggattatataaatgcttgttttagtatgctgaccctaatacgtaaaaataatttttggaaaagtgaggcggaaaaaatcatttttcaaaaccaacaattagccataattacaaatttggatgaggctttagaaatgttatatcgatatggagccattggtaatatgaaggccatcacccctaaggacataaaattttactttgggtatcgcgaagacggttcagagaccctaaactatggtgaaaaattcacagttcattttgcattgagaaaggctctactttagaatatcattttataacaaacaaaggcgacgctgtcaacgtcgccttgtgggtattttgcaaccctcttcagagtactatatacttagaactcttataaatttatattatttatatattatatatacttcaaatgttgatttttttcaagcacttttttcataattctttaactttttcctattctaatacaaatccccctaaactaccaattaaacacataccgacgatttgccatgtcgtattcttctgcaatccggagcacacccctggcatccgtaatcatgcacttgccctcgtcgctgcccttgactggacagagtaaaaatgcttcaccggcagggtccacctggtagccggtcagcatgtagccctcggaatcgaacagataccaaccacaggtgccgtccgtggcctcccggagccagtaccagccattggccgcatagctgccgtctgtaaactgataccaccagcgctggccgtctgcggccggctggaaaccctgggtgtatgtcactgggaccggggtataatcaatatccctcagtttaagcaccttctgccagggcgtggctgctacacggctcttgatagtcccatagttgatacccttagcctcaatacaccaaccatcacctatgtataccccgatgtggcccggcttccacagcgcccagccgaccatagactcgtccagatggtcaacgcctacccgctccacagccgtatcatgatagttgtagctgccacgcagaacgcctgtataccagctgatgagaccggaacagtccgtacagcgctggcctatgtacttagccgccttggtcttgtaagtggatgtgtatgtgcctgggttctcccgggcaagcctgtccagaattccctgggtaaggacctcacccttggcgccgtaaacatagggcgtgcccagcttgtccttgcagtgccgtattaatcctgttgctgttttactcatagtgttttcctccatcaaaaaaataaggcccaggggcatccctaagccatgaaaagttgtgacgtcacaagttgcgatatcgcaacaaattactccatacccggtccgtgttccgggtcctggtcggaattgtgcttcggggtgttgcttggctgccacttctccttatcgtctgtcggcttcgggtcgtgtgccctcgggtcctccctgccagtccccgggccatagggcgctttatgggagcactccgtcaatggacgcttattagtcatcggattgttgtttacatggtcattcagctgctgctctgtcattcttacttctggcataatcttactctccttctatgtaatggtaaatggttactactgcttaagctgcttgacagcctggttaatcccggtcgcagccaatccggatacaattccaatggccaccgcattgataacatcctgggccgggaagtccggcatggtatacattcctaccactcccaaggctgcccccgccactccgcatactaccgggataacctcgttcctaagtctggcggatgctttgcaggccatcccggccagatagcaaatcactgtaatccctgccacactcgctattccaaaatccatatcctactcctctctttctgccggctcctccggcatcttcataagtttgtccttaagctctgttgccacatcattgccgcccaggacatggtatgcgtcatacatccgcttaacattttctttgccatatatagggcagtaacccctgtcctgataatgattgtaggcctgtatgatacggtccctcaaaagtgcctgcataccatcgtgaagtgcggcatttttccggctctcctccttctgccgttttgccatctgccggtaacataagcctaaaaaggtggatatggccacaaacagccactccacccaatggacaactatgtactgtattatctcgcccatgatgtctccttactcagtaatcagttcttcacactccaggtcaaccagtacctggcgcacctggtccttaattttatccgggacctgtccgaatgttttcctccccttcacaatcaaggtcgcatagatgactgccatggtatccacctccttcctcaataataaaaagagcagcagcctaagcattgagtactgcctcgacttccgcccttaacttctccgggacctgttcaatcgtcttcttgcccttgcgaataaggtccgcatatacaattaccatataacttgccattccttacacctccattccctcgtaaatttctgtcagggccagctgggtattggttacctcttcggccagtgccagattggcctcatactgttctatgagtgccaactgtgcctctgtgagctggtcacccagacttaccacctgttcctgcagacgtccaatatctgactcaggcagatacgcaaagaccggctgtggattaccagcattggtcacatcaatatggtccagtctcgcaccatcgggaatatctacccacatgcactgcaggccttgtggtacccgttcctcgccatacataatagtccaaatacggccggtgtcgtcatagattactaatgctttcatgtttcatcaatcctttctttgtgatatactgtttatcaatgatggtttcaagtataggtatgttttctatcttgcgatactattgtttatgggaagtctatatttggggtggccggcaatgtccggaagtatgccgtgaaaaacagtaccgtatcatcctcaggtactgcaagcatctctatcagtgctggatatgatcctggaaggtcaatgtataaggcgacaataccaacagggtttaatgtatcgtgcattgcctggacagatggtgccctagtgggattttggtcaggcaatcctgcccactgtgctggatggaattaccgatttgattttaatatgagtggtgcctggcatgtaaatagtaccaatgctgtcttaccatgtattgaaaatggtactgtctggtactgtgttgccggatattattaatagtaaccaaatactttaactgtcatatttcttcccccgtttattgatcccgctgggagtcttaccaagccggagtttaaggaatagtatccaccattaagccaatataaaaattgggttccataactacttctgttgcttctttcagcataagcaaacccccatccatctcctcctccatgaataggggtgtaatcagcgtgttctcctacaattgatgcatagagaggtgtgaagccaatattgctaatactcacataataagcgtatatggagcaatcacctcccgtaaaattgactttactggtagatgatgtaagggttttagttatactcgcatacttccgcacatttccggaaacgccaaaaatgctcttcccataaacaatattatggctcttaaaacaggcttcccataaacaatattatttgcatttagatttccgtcccccttaaaagtctgtgctccggccaggaactgattagccgcaataacctggttagatgtcccaggcgtgtaagtcttggcggctatttccgccatgattcccgtcaatggatttccgtctttatctacgatcactttccctttgcgtacatccgatgacgctgctgttatcacatccaggtcagcgccatcaccgcccccaggtatccatatcttacccattactgctcctttccaataccgccagtatctcgaccttctcgccttttgtcaggttcctgtaaccttccaggatgtctgccggctcctctccttgattcttccttattctgagccccttaataactatcgctttaaatatttcattcatcacactgcacctccaatgatatctgccatagccactgtaagttgggcattatctgcccttagctgctggatctcttccttgtcagttggcaatctgtcaattactgtaacaccatcagccttaaagaatacaccattaatatacttgtcattcctctcacaaacgtactgcatgcaatcaacggcaaatgcagtatcaccatatacaatccttgcaaccctgtttgcatcttcatagctatatgcaacacaaacatccctgattgtttcatcatgcaccaatgcatatacttcatgtgctaccataatttacatcctccttacttaatatagtcttaacaatattactcctgaaccaccgtatccaactggtccacagtatggtctatatgattggtcaccatatggcctattctggccgccgccgcctccaccagtacctgctccaccattagtagctggatttcctccaccgccagcccctccagctccgccataataaccggtccaatagcgtccttctgatgaactaccactttgccagtacccactaccggaaccaccaccacctgaatatagtgtattaccagcttcaccaaatgctcttgtggttctaccctgaccagttccaggatttaatgtttgtgatgcatattctccagttcctcctccaggtctaccattcccaccgtcttgtccaccactaccaccatttcgataggtatacccccatgcgtcaccgtctccgccaccgccggaacctccatttcctccctgcactcttgaggcgccaaccactataccagactgtccgccaccagcagagcagatatttccaaatgaagttgcagcgcaagcaccacctacagtagcagctatttgttgtccaggagttacatgtacacctttggcagtatttgtatacccaccaccgcctccagctccgccatgtaatgggtttgttgatgaaagatttcttgatacttcactgccattacctccacccccaacacagaatacgtcaatagtgctgaatccatctggtattgtatatacctgtgtaccagtaattgtaatattttgcactccaccagtggctacagttgcttgcttgatagatgctgggtcatataccggactccatatatctccaaagcttgttgttgcatatccaaaacatgtaaagtaatataaggtattgagatttggcatatccataaatacctgtgaccaaccacccggagctgtattactaccaactccagcatatcccgcggcaaggttggcatcaggttcattccatgctggatatctgcctgccatacatttaacgataaccccaccaaatggtttccctggagtggggtttggattctgccattttactaatacgcgccgcccagaatacggcgctacactaaaagacattatactgttgaccgtcattcgtccgatgcccggttcgtcattactgtctgatgtgaccgcagtctctccagccagtacatggtccagcgtggctgtgcactcgtcactcccagttccgcctccgctcccgcctgtcatcaatatttctcccatctatctttacactcctttcaagcccacggttaggtcaatcgtgggtttcttattgtagcatttaaatgttgcctgcccatctgccgtgtccccatcgtcaatcattccaaatgccttgttatacgctttcacctgctccggcgttgccccatctgcaatcacctttaccagtatggggttgtccttcgttgtcagcccctctaccggcacagtctgggtatatggggcttcagcagaccagtccgaggccagaatagagaccgggatgattattcctgcccgttcagtcctcttttttaaatagttatcattatccaacaacttctgataccgtgggttgaatgtatctggcgccccacggtcctgatttgttatctgcgccatcgtcccagaaaattctggggcttctgtgattgggaaatctgccatcctgcacctcctttaaaatacctcgtccatatcaaaaatgaactccatgtcatcatccttgccttttggcaggaacgtcttatatgcaatcaggtcaccgtctgaatcaaataatccctgttcggatatattctgattagccagctccgctttacccaaacgtaccgtgtatcggcagatggtctccttatcatccgtatagctgtggctgccgatatccttcttaagcagttccgccttaagtgccgtctcagttccggttggctcaataacattcccatccgcatccacaccaccagacccaaaggccatctgggtgattgctggcagtgtctggtcccctgcatgtgacctacacagtttcttgcgtcctatctctgtgattactccttgtgccatattgtcttaccatcctttcatagttcatattcaaaaatctctgcgtctaataatttggttccattcagcaggtaagtcccatcaagataccataagtcgttctcgacagtcagcttgcaaatcatctcaggcccggtagatacctgctgtaatatcccggacacggaaaccatggaggcatttacctcttcgtcactgtgtagcgtcagtacttcctgcatttttgggtacactgtcgcgtcagtctgacaggcagtccgcacctctgtatctactgagactgccgtgtatcctctgagccattgctgcactcccactctggtccctgccagcatggacgatcgcagcagtaatgcagtgtggacctttatctcctcaaatacttctgatatcataccaactgctctgccatctactacattcctggccgataggttaccccttattaacatcccaaatggatacaggtccagtcccgctgtcttcttgtacccattgagtaaataagtcccgtccaatttccacgttccatccaagtacaagaactcacggttatatcgggcatagaaattggaggtcaattccaacctacctgatgtagctgtattgactggtatctctatcggatataaaccagcaaaaataaacaacagattggctggtatcatctgccgtgtcatatcccgaagttcctgtaatacgcgacatggctgatcaacaatccacaactccaactcatacgtcttgtcgctcactcgtaatatgtacccatcgttccccacgattaccgccaggcgctccttaaggcgggtaagtgtatagggaagctgttggtcccatttgagcgaaactgctgacctgcgttcttccagcgtgtctccagaatatggttttagacccaacatcagctcatatcgcttaatcccctgaattgtggcatcaggaattaggctgtccttccatagcgaatccaggtctccatacagccgtttcaattcaccttcctgcgccccatagagttgtctgaattcctttacttcccgcaggaaatccgggacatacctggctaaatccagtatccggcctggctgccccctcttatcatccacttatatccccccttatcgcgattgaaccggaagagagtacatgattaccgggacttccattaatctttgtatcatagacatccacgataccttcgatatccaacaggcgtccctcaattcgtgacaccctcacaactgtctgaacatcatcctgccaagccatgttcagttcatgaaaatatgcatcaattgcctggaaaatatcctctctgcatctctcaaagctgtagcccgcctgatagacaatattggacataaaggaaattcgctcctctaccgctccttctacggtaaccgtgtggccaatgggtgccaggccatatcctgcacctctattcgaatctggatcaattacatcctttaccgcctgaattagttcattcgacgggattccatattccgagttaatgattaccagcttaacggtccctcctccatcccaggccggatacaccttgacacctcccacgccagaaatgccattcaccttttcacgataatccgctatatttccaccaaatgcctgtgaatgcagactatcaaaataacggtgccggaactgttccgtcccttcctcgtcctctcccggaatcagcaattctgttagttctgcctgtgacagccctctgatatactcaatcggtatgagtgtcccaaacagcgtgttccctgctgtacctatagtctcacactgcattttatactgccccttagcaatacgttcgactgccacatagttcaatgtctccaacgaaaaacgactgccaatgggaatatccaagtcaaattcaccttttagtactgcatatgtggcctctttcggatgcaagccacgctctaatgctcgcttgattaaatactcacggctagccgtatccgcgaacaattcattcaacactgcatgtaattctgtgtacatcaattggatttccaccgcggccggagccaatgcatcatagacgattgacccttcccttttgtcaacatcacttggaacacggtccagcatacgcttcaagatttcctcatatgttacgtcttcatacatttactgacacctccttttcaactgcaaacactcccgcatcactggaaacggtaaaggttacgatgacttgatttttatatcgtgtaaaagaaaaagccccgacacttcgtattcggtcgtcctgcatcaatgcttccttaatccgctttttaatcttagactccaacacgcccattgacccaccatacaagtctgtgaactctctaccataattccagctgtaaacgatgtgttcaaaccgctccgtgttcagaatacaaaatacggactgctttacagcctctattccctccacattccctatcacccttccatccttcaacctatatgtctttgacggctgttttcggatagtaaaatccgctcttaaaatatctcctgtctttggcagcatcacgcacctccttcctaataccggtctatcacaaggtactgctgcgcccctcgtttctgcaccaatataaccgcctctccagctttcaaggcattcttcaccgcaaccgcaacatcacccactcccggtattgacatctgttccacatgatccgtcagataccgtggtatgagcagctggccggctgtggcagttatcttctggtctatctgcactgccaccggagacgtccccgtcacagttcccaagagtacgctgcacggttttgccgcctcctctgcctgccgtgaaatgttccttaagttctcaatccaatcattatccacttattccagctcctttcaatgttaggtccatggtatgaacacccttatcaattgaatgcgtgacggcttccaccagcagatagttcctgagctgcatgtccttcacatccaggaacacgggtataaggcatccggcccgtaccttgatatcaccaaatgctttcttgatggataggcttttagagggatagttgtacaggcccaaatacgtctccgctatcttctgaccgtccacccccttgtccagggactcgctcatctgcaggacaccccacttgttgatattctccgtgtgtttggtcataaacacatcacgcttctttgaatcatcattttcacggaacagcttaatctgattataggtattcttatcaatactgactgtaaagtcatagtcttgggccgtctcatcatcaatcatcacattgagcttcatgtcctctacattcctgagagtaagtttcccgacatcgtcatacagtacgaacatcttccctgtggccatcatggtcaggtccagggcattcaggataatatcaaacagtgccgtatccggctcattccggaaaggtatcgggtacccagtgtcctccagggtacctgtccgtagattgaagtcaccagcaatcatctggataacctcacccgctgtcttattctcataattgtagctgtccttattcttaaggtaccggagctggtcataggccgtgaccttgacctctccgtcactgccccagctccgctcaaagataaagccgaagaacgtgggggtcccattcacatccagccggacggcgtttccctcttcgattttaagttttccatctgatataatggagaaggagcatttccctggctgtcccttgcgttgggtttcccaggttatgctccctttcacagccggctcatagactgtctgtccgttttgtatatatacatgcacattcattgtttcaactccttatggcatcactagcaccaggccagggtgaattaagttggggttgctaatcttatcccggtttaaatcatgaatctccttccaccggcttccatcccccagctgcttctttgcaatgttccacaggcagtcccccgattttacggtatacgttttggcctgtggctgctcagccgggcgattctcctccggtgtttcagccgttggagtcgcctgatcttctataatagtaaaattcatgattttcgtcccataatgcctggcttccttcatggtgacggataccaccaaatccaggccctccttcacatcatccgacaccttatagtcctccagggtcacatccatgttggtgtcgaaggaatctcggatgatgatgaactcaaaggcgtccccactctccttaaggtcctgcaagcggctgatgaactcctccgcatcttccacactcccgtcccacatggcacatggatagtccatctggggcaggaccacatcaatgctgatttccgcaaggcccggaggccgggttatgtttatttcctctccgttaatcagagtggctgtctcattctggcctggatacttgatgggtattttctgcggaggaatgggaaggagcatatcgtctatgtacacttcgtatgccatcagatatgccctccttccgctgcggatgccaggaactcactggtgaacatggacagcgcccggcccatgtcgtcaaagtcggttttcttggtcagggtgttgctgttcttgacatccaccttaagctcggccaaggtgaaacggttgattacttcctgttcagctgcgtcacgcatgtatttgaggtcctcgtccagaacgtccatggagtcggccattgcggcggtgttgcctgccgtgtcgccggtattattgtggattccgtcccatgtatcctgtgctccgcctactccatcaaagggattgttgataccatcaaaaacgccactcacttttttgtctattccctggccgaactgatatcctacgtttatggcatcactgtacgctattctgccatttagttcaggcgcattcctgtcaattgttatggctgtattactttttccccatgaaattacgctgtcttgcaatgatgacaagcctgatgtccaatctgtcccgaatatggcatcaattatctgtgtaaccacctttcccagtgataaaaaccaagatataatttggcctattaaatttgccactgcgccaccaaagctgtcaaaacctccgtttgttgcattcaatacccattcaattataccgaggaatggctcaacaaacgttgaccatgcactttgtatgatagcattaaggataccaatgaccgtattccagataacagttcccgcaaatgcaaaggcggcacagatgattcctgttgcggaaatagatgtattctgtattttattaatccatgccacgaccatatagaaaactgctataagagcaatgatggctataattatccaagtaatagggcaagcaagtagggccgtgttaaatccatactgagccgctgttgccgctgccgttgctgtcacttcgatgccagttgccgctgcgtgagcatatgcagccacgcaagatgcaatttttattcctttgctaattaattctatcccatttgtaagagctaaatatcccgcataaacactcaatacagcaattacgccccacataatgggttctataatcgaccaattatctgatatcgccctaccaataattcctgccacaagaccaattcctccgaatattccttgtatctggcttgcgtccccctgcaatcctgccgtaaaatcattcatgtgccgggttactacgtttacaacgctcccaaccacacccgacaatcccatatttatggtacgccccagggaggccagggcgcttgttgcatcatcatatttgacattgtttaagtcctctaaattctgagttgtcagctccaccgagccattgagattcgccagggccatgactccctcataccccaaatcctcccacatggttccaaaaagattgacaccggcaatattccgattaatagggtcatccatgcggctaattgcgtctatggtctgctggaaggcctgctttgccgtttccccgccctgcccgaatgctatcgccatcttattggcatccaacccgattgccttaaagccttcctgggtggtcttactaccatcaatagagcggattgagaactctttaattgtatctcctagtttgtcaactgaaaaagtaccgctctgtgcgccattaatcaacatattaaacatatccgtgctatcaaatcccagctttttaaattgcacagaatactcatttatggtatccaaaaggtcgccattcttatcaagcccagcctgtgctccctggacaattaagtcaaatgcctgtgcaccagacacgccaaactgcttttccatcatctcagcagtcctcatgctctcagtaacttcgtatccaaatgtatccctcagcagtatcccggccctggtcatctgttccaagccggtgccagtacggcctgttatttggtagacagttgacatgcttcgtgccacatcatccaggctttcacccatgttatcaatatacagattttccatactctgctttgccgcttccaaggtatctccctgcataccagtctgggtctgcaacgtattgcctgccgccctcttatcatttgcaccagacagaatttcctttgcgccaacagcaattccagccatacccaaagtaccagaaattttttcccaggtttctcttaatccgcccgcttctttccttccctgtgccatactctggttaagtttttcttccccctttctggcccgctccattgcttcatctatctgattgatttctgcctctgcctcattcagttgctttcttgcgtcatgcagacgagcagtgtcaaaaggctgactggatgccttagacatgtcttcaaatgatgatatggcaatattcatagcattggttatcttcctcaatacaggggacataccatcatataactgcagggatgattgtatcgtagccataaaaacctcctttcattgaaaaatgtgtataaaaagaacgccccgaaggacgttctgattattctagcttatttgcttcttatattcttctaactgctcccgcaaggccatcagttccttgactacgtcatcataagtctgcagcatcttctcgtactgctttacgggaatggttattaatctctgcatactgcggcctcctccttaccatcttttaggccagcatagtacgcacgattgattgcctgaaccgttgccgtggcaaattccttgtccgtttcatctgcattattaataacagataaccatcgtgctataaacacaggttcatccacaggatatgtcatgagcatgccacctccccacttttgccaaaggtcattgccaactgctcatacgctggaattctgataacataatctggcacattaatgccagcctggaggaatatatctcgtactgccattgcaatttcgtggggaggaataccctcacttttcataatacgttcaaagagacgacccgcatttgttgcactttcaatagccgccgatactgggtactgacaagtagtggtcacggaatatgtaccagttttacgaagggccggaagaacttcggatgttacccagcgcttgaactgtttagctgtttccagtttacttccaaaaataagggaatataagcctgattcgttgataattgtagtttgctgtttcctgtccaatgaatccatgacccccattaaactggtatccatctcatctacattggtttttatggcatcccaaactttcgaataccccaatgccttagcaacatcattcccaacaaaccacggctcgttgtcaattactactgaccttatccgtccaaattcctcgctgttaaaaatttgcaactctttcatcttacgccacctccttataagctaccgtgcaggtcttagaattgcccttggagtctacataaggtatttttgttggatagttgttctcagccagccatagtttcacatcttctaaaactgacggtttatactggattgttacatcctcgtgaccattcttgctaaaagctgtggtcacaatctcactttctggaatatgtaactttttgatgatagcacccactgcccggttatgtgggttaccactggtggagtagatggccaactctttggcaatctctgtgcagtcgtaaagttttggcatcttttccttgtctgtcagtagcggagccttcacatcgtatcctaaatcagtataaagacgctttacctcagcggcaacaaatacaggctcaactttagctttctccaaggtgctcatgacgttcttcaccatcatgttgacactggaaagcgggagacgtttcggggaagttgatttctctttctttggcatctcgtataatccggtcttgcgaagggtggggagtacttctatagtcagccaacgctgatatttctgcgccttctcattgttggctttcattccaaggagataatacaggctttcggggatataatcatcttttccacacttgtgtggaaagcctaattcatcgcaaaatccgttaaacctatcccacatgacataatctttaccattcttaattctgtaccacccaaatcccattgcggtatcttctgcactgactgatatgcttccatcactattcagaagtgtccgaacctgcaattctagctcttcattctcaaataccatgacttcattctttttcatgaaataaattttcctccttgaaaatacaggcggaatcctttataattaaatacatggattcctgttgttaacgggttccgcatcggagtaaacacgttaccggccaaagttactgtgtttgctctttttttgtttcaagttcttttttaacaaggtccacaatgatgtcttttactgacttatctgtttccacagcgtagagtttaagctgcttacataagtcatcgtccatatctgctacaactctcttcatctaatttcacctccttttaacgttccattcggaacacttcgttatacacattttagttccttttggaacatttgtcaagcattaatttttacgctgttccattcggtacttttgtgttatactatacttaagaaatgaggtgaaatcatggaaaatattggaaaaacgatacggcattatcgaaaagcagctaatttaacacaatctcagttggcttctgcctctaatatatcccttatgagtattcgtcgctatgaaacaaatcaacgcaccccagacattacacaactacagcagatagccaatggattaaaaattccacttgcggatttgcttggattagaatacaaggaaaatatcttagatgatagtgacatctataaattctttgattcccttggttatataataaaaaatacagataatgaaaaatttttgctttttagtaaggatataaccaatcctattcatgtgtgcctcacatgggacgaattaaaaaaaataaaagacgatacctggaaatatctaaaattctctttggctgagattagtagtgacaactgatactcatatatataggcacgctaaaaagcacctggatttctccgggtgctctgcttttacaaacctaaaagttgtcgcttcttggcttcatattcctcttgggtaatagctcctgcatcaagaagacttttgtattttagaatctcatctgctggtgacatttccgcattattaccgccttcaatacttttctccaagcctcccatattacttaaccctaacattatcttttcagccttttcacagtaagacttaaaaagtattgaatctgattttacttttccggtaggtaacaaatttatgcttaactgaggatacgaattattatagaaacaaactatccagcatttacagtacctagagggttcaaatgtaggaataatcgagaaataaacgacacccacacaaacttaaccacctctatctactgttcaaaaccgtcttcaatcacatcgcccgtagaatccaaaagaaccgagttgcgggctttgcgatagatggtttgtccctgaattgttttaccggaactgtctttgattgggtttccgcttgagtcttcgatgttatctaagaacacgaactcgttaggatatcctgcgaaagccgttccggtaataattgtaccatctgctttgtgtgctgtatagcccttcaacaaagcttcttccgtaacagtatcgccggtaaggtcgatcaaaactttattgccgaatacgactttattcgcagccatttgacaaaacctccttatccgatcgtaacagtcttccctccggcagagttgtcggtttctacatacgggattgccttaactgtaacctgagataagcagttgtactcttcatccggcataatcgtctgagcttctttggacggtgttacctccttgctctgtggcttcatatcctcagaaccagacatagcaccttcaacgccaagaatcgtcacaccctcacgaatgttagtagcaataagctttgcctgttcagtggcatcaatagacaccttaccagaaccgtcatgatagccttgcggtactgtatattctccagcaaccgttgagatggtacccttgacagcgccgttgttcttcatagtacctgtaagcttacttccacgggcgtgcgcagtctttcctacgagaatctctgcgacagccgcagtatcctcggaagtatcgctgtcgaatgtacatgtacctgtgatctttgcaccgctcttatcatgagcagtaatacctttgaggatcttatctgcactgacggaatcgccagtaagatcgataaggacatccccccccgtaaatgactttgtttacattcagatttgccataatgtttagtcctccatgacgctttcgttatttttctttatcagcagtcttgttgtactgggatgtactgattccaaggataacaccaaggaaagtatcaaccgcagtgatggttccgactacctgctctccatacgggagaccccagattccagccagtgcaaaatataatgtaccagcagccggaagcagatacatagcaatccacttaaggatgtcgtatgtcttgttactcatgctcattgtgctcttcctccttctctataaatttatgaatcgggagtttgtccacctcctgcataattcgctttgctgaaccattcccgcccatacgttcgtagggttcatagagatacactctcagattctcatattcatcctgggttacacacccacggtcaatatacgacattccaagatacatgatcctgtcatgtgccaatccaataagcatctctgtttttacatctttttgctcgcttttcttttgcaaataggcccacagcccagaagatgcaagaactgagctaaagatcgtaagtacaacctgaaaccatggttccatcgttttcctccttctttatgtgcaatcatgcagacctatcagaaacaatcagcttcttgttgactattgtgatttccttactaaataggtcttcgtaaagctgtattaaattctttcgttgttctctggataagagtttataatgtcctcccatccaaccgcgaaacatattttcgacattgtcgtaatccgcttcttcattttcaaccttaacggcaagtttcttgagttttctacgcattgcggtaactcgatccgggtttattcgtttgatgactttacctgtatccgtaagtgtgtacttgatttgcaagaatttgtatttgctcgaaatcttaacgattctggttttcttacgattgatatggattccaagttcagctgctattttacagacgttttcgagcaagttttcaagttcttctttactgggattcatgatgtaccaatcgtccatataccttccataaaatttctgctgacgcacatacttgacgtaattgtcaatcggatatggataataaattccaatgacttgtgaaagttgatccccaatattgacggacttctccatccacttttcgccagtgagcttctcttttggaatattccgatactccagtttattgaaagtatcgatcatacaagtctcgtattcctcgtcagacatatacgaaatatcgatctggaaacctttaaatatcaacgttaaaagccagtcaataaactcatcgtcattgaacagcttcaacaattctcgtttagcaatctcatggataatattgtcatagaactttgaaaagtcaccgaatagaatataaccgtcatttccgtataattggtagtatttgtggagatggatttcgaatcgttttctctgttgtgaaattccgcgccccttgatagatgcgcagttatcataaatgatatgttttctaacttctggaagtaaaacctcatcgcacagagaatgtcggacaatgcgatcgcggatttgaatgcttgtaataggtcttattcggcctctttcgtgcagctcgaattcctgtgtcggtccattttgaagtgtccgatttattagatcatcttggatttcaaatatataccgcaggaaattcatcatgaatttttgcgtcgattctttccacttgctgcttttcacagagaccttataagccctatacaagttattggcgtcacagacaatctcctcgtagttcataacctattcaccgttataacaatacttaccgtagtaaattgtattaggctttattatttatccttgcggaacggatagcatctccttcttcgttggttaatcgaagaatccggacgaactccattagagttcgaagcgttgttgtagttcgtattgccattgttgttcacattggcaaagttagccgaagaaacgacgcaattttttagatgttaccctttttctaaccgcgacttaatcgccatgtctctttgacgccacctttttatcaatccgatttctcggtcgatagctttaacataccggttgtacacattcagatctacatcgaatatttcaacaacccgctgcaactcgttgatgagctgctcgcaatttacaatggccgcattctggtaatctctcctggtctcgtactcgtgcattgtccgtgggtaaatggtgtttgccgctctaacattgctcgttatcagggaagcacactggtttactttcgatttgaaactccgcatcagttccctgtacttagcaaagttttcttccgaaatttctccatacgcatacttcttccgaacaaagccgtccacatccttaacaccaaatcccctctgcataaggagtatcagcatatcatgcaactcgatcgagtacgtaatcgcttcgaattttgactcttttctgtcgcctaacagaacgctcattcgtaatctttaccggtgatctcagcgaactcctctttggtgatccagcccatcttcaccgcattacgaactctggtctcattccacattttcatgctgtaccaaagctttactttactgtaattcttgctatgttccatggtgatcctccttcttaaagctctacattggacatcatcgcaatgtaggcgatgtcagactgcattttggttctggtaaactcctcctcagaaatatctctaaggacaaaccagtattcgccaggaacctgctcaacgatctgaaccagctccatgttcggatgaacagtctcggttgttccgtcgctgatagtaaccggagagcagttatctgcaaatacagattcctcgattttttctgtagaaatgaaattgtttccgttcagcttaagattggaaatctcagttccattaccgagaataattttatagattttctcttccatgattagaagctcctttcaaaaatataaacggggcacaaggccccgcgattttaattaaccaaccgggaagaccggacgaaccccacgagagaccgaagcgtcgccgtagtccgtaaagccattgaggatcacacgggcaaagccagccgaagaaacgacgtctcttaaccactggttgtaagatctgtttacgatgaatctcggacataccatgaacaacgccagctgagtcttgctgattgtgtagatactcggaactgttgaaccatcagaagttggactgaaatgaggatggccatacatcataggttcgttcgggagctcaatgctggaatcgaaccatgctccacctgacggtcttccatttgcaaccgcattgcacaggtattctctgtgagtaagaacagacccctggaaagccgcatttacgattgttttggcgtttgccaagttactcttgtacatcgcagagcccacatatccaccggtcgtaacattggtagtattcatctgcgcattgtaaagcgcctcatccggcatgataacgagatgatgactggtaaatgcagtatcaccgcagttgtaccagtaatccatatcaacgatacgccaaatacgacctccgatactccaatagtcgccaaggaacattcctttaaaggaaccgtccttaatagcagctttctgtactgcggtcagcgctgtaccaagattcttgcctctgaagagtacccggcgaagctccaccggagcaaagccatcaagcatagcaaagagtgcgtcttcagctgcaatagccttgtttccgtccgtagtcccgacgagtaatttgttaccggataccagctcgttgatctgggtgagttcggaaagatttactcctccgataaaatctttggaacttaaaagaccgattaacgcctttgctaaagcatctgccgcaatagtctttgtcccgttaggtccgtcaagcaggaaaatattacttgctgctaacgcctggaccttttcgtagtctgtgattttcatttaatgaatcctcctttatttgatgacaaaaatagcccgaccttcgataacatcgccattgctgtcacggagaagatcactggaatatgtacgtccaatgaccgtatccaaattgctgtcagtaatgggtgcgtccgaagaatcgagcacgtctccgtaagtacggtatccattgtcataaagcttctgatataccgtgtattcgttttcaaggttggaactgaactggttaagaatatctacctgctcctgcaattccagcagcttcttagcaaggcttgccgccgtattgccatctaacagtgcctgtaactgatcaaaccattctcgaaattctgtttctgacttctgtttccagtcagccatttccgcagtattgatgcttgtgtattcgttgaaccacgcctcccatttttctttccaataggtacttgtggcttccatatctgctgtatgctccgagtaccaaaggttccactgagcttcccatgtcaaatatgcagactgaatctcctcagtctgtgccagaaaccaggtagaccactgctctttccaaaacttatttgtttcttccatatcagtagtctgcttttcgtagaactctttccactggtcctgccattgagcaatcaaatcatcgatttcgaccttgtccaatggagccgttacgaatggacactctgaagttccaacgcagttcgtgatgtttgcctgtcgaatagaagtaactccggcgccgacataaatatacgccagcggatattgccagcgatcatttgtcttcaccatcgtaggtttcgttggattcgatgctggggttcctttaatgattttgatgtcatttgctctgacggcctctctcgaatccacttcaagcacaactgcatcatatcggttcagcagaatctcggactgtggaactactaacggtaacagagcgtcattcagcgtccaagtgtgattgaaccaggctcgtccgacaccaacgttgataatcattgcttccgattcttttacaaccattgcagttccgacatgctgcaatattccgtcctgaatgattccatcgaaaatgctggacatctgaatagcatcgtagcgccgatctccttcttttgaattataaaatccaaatgttacactcacttcttcatcacgctccttcctgttctatagtcttaaaagtcggatagacggaataaccgtctttatcttctgaacgaacaatttcaagaatacgagcttttgtctcatgtccgtattcgttcgcaatctgtacaatgtccccgttaaagaaatcttttccatactggaacatgatagttgtttctgtttctccctcgaatgaggtaatgctcacattttcagcaagcttttcttttcctctttgctgcaactgtgccatatactcggcatcggtcaacgcatcatcgcttccaacatttgaagaaatgtcacgagcgtccgtaaacaattctctgcgattcaaaccagagccaccaccaaccgtagtatatcttcgatcggcgccctcaccttctccaccaaccaaggtcactgtcttcaacgaagctttagattcgatgtagttactattgatgatgttctcgaatttcggtgaaaatataacgtagggattccccgtctgatcgtatgatctatctgaaccggcatacaactcaaatacgaactgcttttcatcattcagagtgatcttgaaaccgataccctgctcctcgcaaattttctggatgacatcatacaggttatctcccgtgtactgagcttccagtttcaactttgtaattgctggatcggttgattctttgaaaataaagtttggaatttttcgattgctgtctgacggagaaattacattctcgttgagcagtgtttttattccattttgaagatttccgcttaatagtttctgtccccagacgattcgcctgtcgaggatagattctaatgaacgcccagtaaccgttacatggttaccgtcttcggtatctgaagtaatctggattttctccacgatcatcacatgttcagattccttgctctgcaaatagtaatcctgtttgatgtagtcaagaagaccctctcgcattgcttcatacagttcaaagtcaccgtaagcgtaataccgatctgtccagatgaaggactcgtacgtatccacaatagagacagcatctaggttggtgtttaaaattgtcacatccatagtgcttataccccctcgtagactatacggttctcaatcttaaactgtaaatttgtacttccatactcagcagtataagcaaagatgttgtcgcccttcgcaagctggaaccaatcagcgtttttatccaggcagttcaagatgtttgtagtctttccgttcctaagaagcgtaatcgacttgtttccttttacggtgcagataatgatttcatcacctgctataattccagagccagtgaatttctccaatttatcggtatcgatccgcatcacttcacgagtaccggtattgtagatcgtaatattgctggcttcaccgattgcgtgaatcgtaatagtcactccgatttcagcgtcgccattatatacaaccacctgctctgtttcatttttgatttctcccatttctagtaacgggtccttaagagattcattaccgaaaggaaactcgaacagtgcctctacaccatagaagatggttgtgttgattccgtcttttccggcagagtaaaagaaaggattcggacacacgattgagatatccgaaccctcgtctttactgaagattgttgggtcgtttgattcgacatacccttcaatctctgcctgcctattattggtttcgataagcattgtgagcttctttttaataggaaaatacttgtatgaaagctgtcttacgtcttcgatggaatccttccacatatacgcaagagaaataacaatgtttcggctcggcatccttgaagaattgaacagacttccatcgtttgtagcgatttccgtcgtattgatgttcgcttttcctggtcccaagccagttacagacttgatgatgaaaccggattcctccggtctcgccaaatcaagtcggatactatcgccaagatagttcgtaaacgtgactgctcgaatcaagtttccaccatcctttccatcgccgagaactgattcttcgtctgccgataaatctctgttctcgacagtgccttaggcgaatagttattctgtgtaaagttataagagttacctgtattcggattagtatcttcattttgaagattccgtccacgagctgctgcaattcctgtgctgacggttaaagcctgcgatctactgaacagcgtattcagtcgatgactcttctcttcaacgtctgacagatccagaatcggtcgaatcgtaggctgaccatcaacaccgttgtcgatcatatccttaacctttgcgattgcatttccgagacctgtttttgccgaatcagccatttcagcactggcattatatgccttcaccgcataagttccgatggcattaacgaatcccaatccaaagaaatcaccgatgtggtatcctactctggaaggtgaatgctcgtccagttcgtcttctgctgcttctgccgcagcccttgccattgctctggctttagcttccgcgcggtacgtattctcactgattccatcagcaaatccctccaccaagtaagcaccagcctgtttaaactgatcatgataatcccggatagctgttacagaagcattaagattgccagtgaaagctgtttttacttcttcggctttttccttaacaccagcgatgaacttaatcatgcactgcattcctgcattttgaaattccggatacttgtttgcgatagctgtaaggcatgaacttaagatgtttacaaacgcatttctggtttcgtaatctttcgatttaactccagcaataagcttgatcatgaggttcgcacccgcagtattgaactgagtctgcttattattgattgcagtgatgcaaccgctaataatgttggtaattgcagttttggtatttccgtcctgagatttaattccgctgataaattttgtcatcaacgtagagccagcagtattgaactgggtttgatagttcgtaagagtcgtaagtacagcctgcatcatggtcgtaaacgtagatgtcagattacctttctgagcattagccgcattgatgaatgtcgtcagcatagaggtcgcggcggatgtcactcttccgctcgcatctgtaaacgcattgatgaaaccgtcgataccgttgtttccaagctgaatcagtgctgtgctaaaaccactcataccactcgtatctaattcagccattcctttagccatttcaacaagtcgattcacctgggtaatcacacttgacatgattccggtatcgattccagaaatagaatccgaataactcttaattccacttccgaactgaaccagactatcaccaaaactatcaagatcgttgtcaccggtaaaccagcttacaagtcctccggtatttggaatggtgttggcaagctccactagggctttaccagctgttgctgagttcgtaatagccgcggagtccatacccataatagcttcagaatatgccttcatagcttcaccgaacggtacaagtttctcaccgaaagtatcaacatcgttgtttccagtaaagaatgctacaacgccacctgtattgggaacagtatcagcaagctcgactaaagccttgcccgccgttgcagaattgacgattgcatcggcttccagtccacgaaccgcatcgccaaatgctttcattgcttcgccaaatggtacaagctgttttccaaactcacccatatcgttttcaccagcaaagaatcctacgacaccaccagaatttggaatggttgttgccatctctgccatggccttgccagcgattgccgcttctgtaacggcatttgcatcgagtccagtaattgcatccccgaactgtctcatagcttcgccaaatggtacaagctgctttccaaaggcagtcatgtcattttctcctgcgaagaaagacactaatcctcctgtatttggaattgtggttgccatttcagctaatgctttgccagctgtcgccgcatttgccacgatttccccgtccatgtttccgatagctaacgagaaatctctcatagcttcgccaaacggtacaagttcctctccgaacttagataaagacgatcctcctgtaagccaagaagtcaatccctgtaaaatatcagccgctgtcagaataagcacagtctcggctaatgcctttactccgtccatcatagatggctgaatctgactagctccctgtaaaaacggctgaacattattcataaaagcggataaatcagctccaatttgcgggaactgactcgacacaccgctcataaatccgccgacgattccaccaacgaactgaccgattgccgttccgattccatgtaaaagctttccaccttctccgataagccaagaaagtcctggaagtttcgataagagtccgacggccgcaagcactaacgccatctcagcaacaaccgcgcccataccaaggattccaaccattgctcctggaacaagcgatgctgttgcactaagagcaagcataatagctgataacagaccgattccggcaattccttttagcaaagctccagtatcgattcctctcagtgcatcgacgataccagcgaaaaatgctacgagtacatcgacaccagctttaatcagtgacggcagattactagcaataccctctaaaattccaataaggaatttgaaagctagatctacaatttgaggcgtataagtaaccagagccgctaatacaccaaccactaattgtaaagctccgtctgccagctgcggtacacaggatacgaaaacatcgattagcgttaaaacaactgcctttacagcttcaccaatagctggtgctccggcagcaataactttgcagattgcgataattccttctccgacttttgtaagaacagccggaattaagccagcgataccagtaacgataactgtcagtgctgctacgattgcagtcgctccagcggcaccagcagttgccagcgctgtgaatccgatagcaagtgccgaaagtcctgtgccagctgcaagtaaacccgctccgattgtaagaaccccaacaccaatcaatgcaaacgctcccgataatgccagaatagtcggaaccaatggtgtaagtaccgcgcctgctacgccgataattgtgaatgctccggcaatagaaataagtcctttcgcaatcgcttcccacgataacgctcccaaaatactgagtaccggcgcaagaacagctaaggctccggacgcaaccaacaatgctgctgatccaccaagcgtacctttcatgaaattgagactgatagccaactcggctaaagccccacccatgacggtaagacctctaccgatctcttcccactgcatacctccgaatttactcatacagtttgcaatgatttcaagtgcgccgccgacgataacgagcccagttccaataccgatcatgttcttcggcatcagattaacagcaatagctacctctgcaagtgcgccgcccatagcagttaaacctatgccgatttcatcccactgtaattgaccaaaatcttttacagcggaagcaaagattttcattgcagcgccaatagcaattaaggctacgccagtagacattacgtgttttgcatttccagccaaattcgtaaagacagcaagttcggcaagtaatccaccgattccagctaatccttttccaatctcgctccactccatctgaccaaagtctttgcaagcggacgccaaaaccttcattgctgccgacagaataacgattccagttgcagtgctgatcattttcccgttgaattttgcaactctaaggaatacagcaatctcagcaaataatactcctactcctgttaatccacgtccgagttcatcccattgtaatcttgataaatccttacatgccgacgccaggattttgatagccactccaaatatgattaagctggtggcacctttcataacctgcttctgaccacttgccatggctttggatgatgcaacaacaatagccgtaagaccagcaattccaaccaagcctctcgcaagttcgccccaatcaaggtctgaaactttcttcaaagctcctgccagaatagataccgcaactgacatggcaatcatcgctgtgcatgctttggatacttttccagtatcactactgattttattgaaaatcgccatcgctccaagtaaattagcaaagagtacagtaattgctccaagagaagctgacagtttatcactatcgatcagggaaattgcaacgatagaacctgcaagcaaagcgattgctgcaccaattttaagtagcgttccagctttaagatttgtctgatatgcctcaaagcagcctctgaccccgtcaagaattccagttactccttcgagaacgccatttaacccctcaagaggttcggttacactctttaagaatttagaaactgataaagcaattccaccgacagcaatgctgttaagaatgtcaagaactccgctgaaatctgcatttccaagtttctcggcaagtgttcccatcatagtcccgactgcatcggcaataccgccagcaattacctttacagctgtccacaatgcttccatgactttgagaaatttacatttttccagtgcttctcccatcatctcaaaagcaacaatgactccgctcttcatttttccagcaccatcaccaatctgagccatgcgattatgtactcgttcaaggaatgagtggaataattcaaatccatggaaatcgaacttctcccctgcggcttttccaaattcttttactttttctccggcagttttaacaaacgtaataactgtctttacgatatcaacaacagtcgaaactgctttaccaaagatatctgtcttctttacagtttcatcaagcttaacgagatactcaccgaagcttccggtaagtgataacaccccgtttccagccggtaagaaaagaccaatcaattcaccaataccaccagcaacagctttgaaagcttgtccgacgatatcaagcactgcaaatacgcccttaaacgtattctttagattctttgaactctcttcccccattttgaattttgctgtcagatcacggatacgttctgtgatttcggctaactgttttccagtcattggcggaaagatttcgttaaatgcctcccgaacaggcttagcaacgctaaccagtccctcgaaaacattctttactgcttcgatcatcatggttcgaccaccaaggtctttccaatcctgaagcattttatttcttgcatcggcagaagcattgattacggcgctgaacgtatcactaacttccgtaagtaattccttcgcctcttcaaagtcgccgacgataatttcccagctttgtgtccatccggactgggcagcctctttcaatgtgtcgaataactgggtaaaagtttttacttttgtcgcagcatcattcgcggtcttacccatctccatgatggatttgatctgatcatcggtgtatcccatggttcgaagctgatcttcgttgagatcgcctgtaaattttgccaaagtttcagtcaagatgtcagaggtaagccatcctttactaagggtctctctgaatgagccctcatctttgatcatctcatcaatggcaattccatgaactttagccgtttctttcagcgcatcctggaatacctgaccacccataccagcgtttactactgagttccagtcctgtaattttactgttcctgccgctaatgcttgtgaaagctgatacatagcggtacttgcctgctgagagttggaacctgatacggctgcaaggttcgcaatacccttgatagcggctacagatgtgtccaaatctacgccagccgcagtgaacgtaccaatgttacgggtcatttccgtaaaattgtaaatggtcatatctgcataatggtttagttcatccaacgcattgtttacctgatcaagagttgtgccttttgaagaggtatttgcaaggattgtctgaacggcattgatctgggtctcatactcctcaaaaccggttttaatcggatcgatggtaaaagcggagacaagattttttccagcagcaagtgcagagttggtaatgttctgcaaagctgtaatcgccatcacttccaatgccgaaaatcgcactcgcacagtctcaactgcattactcagcggtgacatattcccactgcatttatttgcggcatcgtttacggtttctaagcctttcgccgccccttcgaggttaaggctcttcttcaacttatcgaggcttgataaactggtctgaatattctgttcaaactgtttgttatcaaaccgcatttcgacgacacgttcgtcaacagttgtactcatagcttagtaacctccttccatgccgcatctgcaattttgtcaaaaataggctggatagcaggattgatgtagtctctcccctgtacccagccgccgtttcttgttgcatgtccgtactgcaaaataactgcaatagggactccattttgaatatttgtgttgtaaaagctgatcgatacggaaccttgtttctgttcgatcttgtaatgccacgaattcgccgtcagtcctgtatcaactggcgttgcagacgcaagggcggctacgccctctcgaccatacttatcgaggtcaccgagacgaaccgattcttttgctctctctaagaaccgagtcagcttagaaaaatcacccttttgtctgaacgtgatcatatgaatctcctactttgctaagtacgcactggatgagaaccctgtgtactgaacaccatcgagtacaaactggatgtacaaccacttaactccatttgccattgtgtagtagccatagcacttaaccttagtgccagccggaattttacaaagagccttcttatttgttccggcatcattacggcaataaagaaccgccgttgttttgtattcgccggcataggctttgctaaactgtttagcagaacaggtagccaccactttctttgaaatggactggttctgatcctgcttggtatttgacggggttaccgccgatccattcagaatctgatttaccatgctctgaacttctgagtagctgtatccatactcagtaagcagtttcttacggttctcaccgcttccccacagtccaacaatcacctcatgagcaacagttttgatatctttgcccttgcttaatctaggagcggcaactgtattgtcatcgtactttggtgtgatgaagccacggataaattttccgttaatagacagggttctcttcttgaccgcattactgtagttgccctcttcaataaccatgtaaccggattccttatgtacctcgattacggtaccgacatgatctggattgcctgtgttgtcgctgattccgttatcctgccagtcatacaaaatcgcatctccaggactcggaacataagcatcgttctcctgccaacatcccattttctttgctgcttcgatgaggtaatagcaggaaatttccataggcatgatgctctcatatcggagagctgccgctaacgcagaccaggtgcacgcacaccaagcccagtcataacgcatccgaatgccacgaggaaatttgccagcgcagattttctcaaagaattcgttatacaaatcgataatgcttttgtgtgagccgttcgattctttctttccatcccaggattcgacaagattaacgacggcctgtctcgatttcgccatttttatcactatcctttcgaattaaatttctttctgtttgcggcgtttacttccgcataatgtctgtataaatctcgtttgctccgcttcttcgggggcttgttttctgcattataaatccggataagcattaacaaacgattcaaatgccatttctgacactcaaacggaatgtgatacgccgtcatccagtaataaataagttcactggttatctgctgcctatttattggaccgcctttttcttccttaacagtcgaagccgtcattggcgcttcaatataggcgtttaccgcatcaatgtgcgaattggtaatgcattgatagaccagcgggtcaacattctgtgtgagtgtcatacagcgtatataatcaatggtttcttcaattgtcttctgctctttagataagaagactttgcaccatttactttcccattttgaaagtgaaacgagcgaatgctccaaacgcaacttctgttcctttacagggataaatcgctgattccgctcatcccacagatcggttcttggtatcgtaagttcaagcattcgatctcacctctttagttcgtggtggcaaccacaggagcaatcttcggattttccgaatgcttcttgatatctacaactttcggaattacatggtttacgaattcagcggctttgctgtcatctgtagccagttccataaacagaagattgtagaactgagtgcaagcaaactttctggaaatctcttcagacttctcgaaatatgtaccgtcagcactcttctctccgtatgcctttaagataaattccttaaagaacttgataatggtcggctgatcttttgcatctacgatgcgctgaagcatctcagcaactccaccagctgtgcccagttccatctccataacctctgtttcggtaaggttgaagagctttgtttcggtgcgctcaacgccgttaaaatctttataagtctttgttactgcatacatagttttgttctcctttcgaataaaaaggagtcgccagctttcctgaatacgactccatctgtggtgtgtattatttctgattagccttctgcggtcataatcttaattacttcgtccggaagcggaagtctcggttcaacaccatcatctgcttcggcggaagaaggatctttaccatacaggatctcttcaagagcagccagtttcttagcatcgaccttggtagaatcgaaggtgagaatggaagtgggcttcaacttctttccatcgattaaggttgcaatctcgactggtgtggtgctgaactcccaggataaggtaatagcttccggactgtcatttacagttgaataacccttctcggaaggagaagccaagcaaccataaacgagatgaagcttatagccgtaatcattggaatcaacatcgttaccgagaagcgtcttgtaagataagccgaacatcttacggttctgctgtcccgcaaacactccaggagcaatctctttggaaccgtcgcactctgcgaactcatccggtgccatataagcttcgattgtgccgccaaattcctctgcggacataaggttcagatacttgatattgtctgcataaattgcagtaggttctgctccagacgggctttctgttacggtactaagaccgttccatgcggtaccagagttatatacgccgccggtctgaatcgggtaaaggacgccctgactgacaccggtctcatacaggcgctcgccagtcttgtcccaaacgagtttctttttcatagaatttgtcctccttaaaagaatatttcaaagacatcgtgatttaagttgtctttcgtgtaatgccgattgaatcggcttgtcggcatagatgccaccttgccaacgagagaactatccggatcgctgtcaataactgttaccgaatactttctcgcagacaaataaaccccgtcattcgcaaacgtattctcaatatcgtcgagagcgtaaacgatggcggggtatttcatttttaccgatgacggtggttgaaaataagcacgacactctggtcctttgtttggacacgagaggatgtcgcataaagcattatgcagtttcagtcgtctgctcattgtaaacacctccaacggtcaatattaaacggggatactgaacttcaacatttgaaattttccatttagctcccatatactcgataaatctcatcgaatgaaaattcgcataagcaaacggatcggctacgatgctgaactcattcgacacattgagattgtcgttgaggttatccgaactctgatactgtcgagtattccgaataacgtctccgtagtagtcacgaactgtaatcttctctccccagacaccaggtcgaatttcctctgttacggaatagccgattgctccgtaaaatttactcattttgaattttctcctttaagactttaggctgtgtgatcctcggaaccggaagaagcagttgttacatcctcttcgattgcaattgcagagtatacacgagtaagagcaccagagcatctggtctcaagcagggatttctcctggttgaagtcgatatcgaactgagtgaagtgagtaacctctccacccttggttgcaccgagggagtaatcagccagatttgcgataatggcaaccagcttcttctttttgctgtcggaagtggttctggtcttaccctcaaactgctccgcagtattgatactaccaacattcagtgcagtggcaagttcggtcttggaagagtaaatacgtcttccgttgatgtctcttgccagaagcatctgattcagcatatgaggagtaatgaacagatccggggtaccggtgcccttataatcctctcttgcatacagaacggtattgatcatggcctctgcgatgatgtagttctcaccaaagttagccgcggtattggttccctgaagttctttcttagcagctgctacatcgagatcaacgtgaatggtgtacagatcatcatccagccaaatcggtctgatgtgatccggagaaatcttgccttcatctccgtcgtctctaccatcacccagcatgattgcagttgccagctcttcattgagcatcaggcggtcgatgttgtacaggtatgccacatagtcgaaatcagtgatgtcgatgatatcatctctatgcagcgcactctttacatacacagtctgagggtcggtagttctgcgaaccagcttgaagttgccagtctgcttcttctgttttcccttagtatagcctttagccttaagagcatcgatgttgcggatatctacctgactagttctgattctggaaatcggactcttatgaactttgttcattacagttgtgatccaaccctggtcgttagtaatcagctccggtgcaccaggacgtacatccttgtattccgggaacagaagtgttacattgccatctcctgtctgagcaaatccgcttgcaagagcatcatgctgaagtgcattctcattagcatagatctccagcgcggtctggaatgttcctacctggcttgtctttgccagcttaaggatctcttcctggtctgcatgagacagaaagctcttatcatcgcgcttgtcggtgtcaaaaacattgtgtttcatattgtcatctcctcctttagattcattatcctcttttttaggattttctttgtctacgaattcagccatcatggcgaaaacggctgtctgctgtttctcgttcatggatttaaaaatgtcttcgatagtctcaaccttatcgtcttttttctctccattatctgatttgtcattgggctcgattttttcttcttccttctttttatccggctcatctgcggaatgctccaactgccccatgatcatttcattatagccaatgacaataccggtttcgccgtcgccatgcatcaccacatcatcgataaatgctcctggatttgcaccggctaataccagacttacttctctgataatgccatgaacaacatcgtgtccagcctgtttaagctgattggcaaagatagaaagagactgtacgtcgccatgttttacaagttcccgtgcagtctttcctgattctgtatcattaaattcacagaacgcataaactccttcatctctattttcgagatgagctaatccaagcacattcgccggatcggcatgattatgcatccatactaacgggacagtctgcccgttctgccctttgaaagcgtcttttttaataactcttccatcggcacactgaagatcatttctagtggcccagccaccaaagtcatacttcattttgattttcctcctttattttctgatatagtacgataacggatgcgatgtcttctttgatgagccggaagattttttctttgatttcttaaccttcttgtactcagactgaattttatcgaattcatcctgatacgtttgttcatatgaagagtcaaggtcggcttttgccgctttgtaagcttctctaactgacttaaccgctgcttttagctcggagctaacttttgctctttcgcttttagcattagtctggttctcagctttttcttccttggtatcagacgatactttcgctttcttgtttgtcgcatccgttcgaacactagccttgtccgttttggcatcgctactgatttttgctttatctgattttgcatcatttctaagctttgcaatctttgctgttctttcggcaacacgcttagctctctcagttttagataatcctgacggaatttctatcgccatcaaacgctcaatttctgcattctttttattatcgattcgttccttttcgctagatgattccttttcaatttcttccaaatcagaatctttatcagtatcgatgtttttcttcctatcggaagcattttgggttaaagcctcgttcagttctttcaagcgagaagatatctgttccttcgtagcttctgctttttcacgaagttctgtaatcttctgatctcgcttttcctgctcctctttgacttttgcggccttttcagatttaatgttattttttgtataagaccaaatcttctttccatcgtcattcagtgaagtggtagaacgccccttcaattccctggtacgcatataatattcatgcgctttctgaggatcgtagtagggcgatgcataatgtctaagaaccgctactttaggttcatccattaagaatcatctccctccttatcatcgccagatgtataatttccgacgatgtcatcgatctgtgcagaaatactgtcaagaacttcattaaccagagcatcgtaatcactggtatcgctggattccgttccatcaccacttgtagcatctgttacggaaccaccaggctcacttaaattgctgtttctcaattcatctgccttaggatcagcggatggcttccaaccgattacctgtctgatttcatttgatgtagcaatttcatttctggtaaacttatcagaaatttcagcaagatcagctaccggcacaagcttgaatggatctctaaagaacataattgacttgttctgggacctagcagtctttgttaagaattttctcttcatttcatcaacgattgcagaaatgataggttcaatcgtccggttgtaataattcagcatagtcttctcgtctgcggtaccatccaagatgctctgagtgattcctaactggctgtaaagcatactcgttaagtattcaatctgcttcattagattgttttccaaagaacgattcaactgcgtgattctctctgttccatcggtataagcaatgccatacttagaaccggacaactgctgctcgatatctttacgccgctgctcagcctggtgacgtcttgcctctgatttaattacataaggtagctgaatgatcaaatccaacttgccggagctgctctgttcatcgacagcatctagcaaattcaattttcgaataagcctctgcatcgtcgaattcggttcgttaattaccgcatacagtggattttccacgatagcaaccgtatctttcggaacaacaatttcttgttttcgcccagtattttcgttgtatacctcaacacggacgtgacgaggataccagtcacgaattcgaccaactcgcatcgaaagaatctgatatccttttgtgtcatctggatcatcatcggtatccacaggaacgattgctacacagccttcatccatcatggacataacaacatcttggataaatgccctaccagtctgatcaagattggcttccaacgacaaacattcgtttaaaccgctttttataacatttaaaaaccgcccttcatcatccaactgaacgtgctgaatgttgatggcggctacgtctaaagcgattctattgtatacggacgtgactatcgatctttcgtttcctctggtaaggcgaaaacgatcaggacgatatgaataacccgaaccgatattctgggacatcatggtaggggctctattgcgaaaagcattccaggcatttttaaacctggaacttaatgataaatccattttgaattctcacctcctaaaaataggcaaaaaaaaagaccccttttcttaagaggtctccagtaattttacaccggtattttgttcagtatagattcgcatatgattccgttactatcgggattataatgctcgtctaaacacttcaatgtcaggaaattcccaaccttttcttctatgtctgcccaatattcatcggtctcagataaaccgttaaaatcacagtccaatccgagtgaccgcataaggtttatttcttcttcactgaacatatgctcatcctttctttaaatatttacgctttgttctacttcctgtacaccatgtagttgttatggttccattttcaggattcactgctactgtcgcagatttccctataaactgctgacttggtcgcccaaggttatcggtttttgttttaatgctaccatgattcaacggatttttcaatgcatccaaaattccttcaacggttaccggtcttgattcggtttgtgtcctatcaagggcatgatctgaaaaacgtgtaaccagtattccgtttgaagcttttacgggtgttcgcaactggctattcattcttgcctggatagagcttctatcatgagctaattgttctttcgttctccgaactccccatttcataccttttattccataatgcatcaaattatcacttgattcaatatgagctacttttctgatggtacagggtcgtaatacagaagagtaatcaattaactttgctactggcatctttatccccctactcgaatgcttctcgatttgccttgaatgcgatgtacgcatccatcattgccgcaacggcatcaattttttgttcataccgctttttcagcaatttacggttcccgttagtatcttccagggtaatgcagtttcccatagcaaatgtcatcaagtcctcatcaaagagaagcatcctctcttctgaaagtttcttcaattcgccaagtgggacagattctgtctttgcaccctggataactttttctattccgaatggtccattttcacttgcccaacgttcaacaaattcctttgcattgtatgggtcataaccaaagcatcgtacatcataaccgcattcaataatatggttatccaaatcctcatatacttccatcatgtcaagaaccgtcccttccaacacaataagacttccctctttcataaactgatcgtatttaattctcattgctgctgggagtttcatcagagtcgatgaggaaatgtagtttctggttttgacgccgaatgatccgttcgacaatgggaataaaaatgtgaatgcacagaaatcatcgccttgtgataaatcagctcccaaagaacatggcatctgccaataatctcgatggcgatgtgggagagtttcttcatatgtaaagtaatatgtgtatccctccataggaagtccgaagcgcttagccaaaatatcgtttcgagctgccggagccttttctgctctctcaacgtccagctgataggtttcataagaaacagtctttccaaggttcggatttgctttcaaccatttatccggatcggcaacctcatcaatagaatccagcttataccaccagatcgatacgtgcggattgatataatccccttttagaatgtccatcaattccattttgattgtatcgccagcaccgttacggacagtaccctctgaactgatcgcaacgataaggtagtcgttgaccttcgatgcaccctgttcgattgctccgattacatcttctcgaatatcaccagaaagccactcgtcaaccgtcgccactttaagctgaagtccctgaagtttgtcgattctcattggacgaatttcaagaagcgatccagtaaggaagttttcaattcctttcttagtggatgccaatttcattctattcgcctttgatccggttgtgttctgcaacgatccttctgtaaggaacttatagaaaggtcctcttgatctggtaatagcggttcgaatcggggacaacacctcttctgcctgcttcatcgtcggggctgtggttatctgatgtgtcgttgtgacatcaacatttaagaagaaattctgcaagcatgaaccatacattgactttgcagcacctctggccactatgagatattgcttattaactaatctttttcggatagacttggtgacataatgtccgccatgaccatcttcataaggttcgtatacacttctctcaacaaaatagtaccagccgaaaatctgctcagcccaaactttaaatgtgtcaagcagtttcaaatctgaaccgtcagttaaagtaagctcattctcgcaataactgataaacccctctactgcttgatcgtcgtaataaattccaggatttgcaatgagatcatcgattcggttcatctccatctcgatttctcggcataccggaatttcgccacgaattacggcatcacgaaacatgccgtagtatttcgggacggcagtgttcgataacgccattattttcttctcctacttcttcttattcgggtttgcagcgatatactgtgcggcctctttaagattgaattcttttgtcattgcagtctttacggcataggtcattgctccagccgcagccacagtcaacgctttctttccggatgcagaaagaatttctgacacatactttctaccaggtgcgatgtcgtcttctgtaagattcttaaactcgcgttctaatttaagtctctcaatctttttcttcagatcggcatcggacattgttcgccgattcttaacagcagctttacgtgctgatacctcattcttatcatctgaagatttggaagaatgtcctctggctcttgcaagctgtgcttctgatcttcgaactccccatttcattccaagaattccatggtgtgctaaataggtgttattcattttgaatctccctcctttgcgatgtaactggtaacacctccgctggcattggatgtctgataatatggaacttcatgaatcacaaggtcttcgctaagcacctttccagatgtatccaaagtttgagtctgatgtgcctttggcgtaacttcgtacgatccagaataatgctcaggctcgtccggatcggcgtcatcgttttccgcagcaacatttagacgccattcgtactcgctgatttgtgttttataacactccagcacggccgaactaagcggcggatcgaaaagaagtttgaccttcaaatgcatataagatttgacaagcatgtatttggattcatcagaaatgaaatctttccacgttgcactcttatcttcgatcatgaaacctttggatggaccgacaccaagctgtgtaagaattgagaacacagaattgatgtgcatgatcaaatctacatcgaaatgttcatactcctctgcgataccgagtaatttcttgattgatgtcagtacactatctgtaatattcatgatcgcacctccatctaacagagttttataaactcactcatgcaatacccgctgataccgtccacagtctttactttataaaaaccggaaacagactcatcgttgcataccttcacaactgtatccgagccgataattcctaatgatctggatgcctgcgtcgggtctttgcgaatgtttaaattcatacaatttaccacaacacccataagtggcttcttgtttccttccataattttcctcctaatgcctccatgggcatgtatcattttttcgtcgttcatttggaactgttaaaagtagtttctcatctccataatgtatagcattgtgggtcgataaagttgttgcaattagatactctggattcagaaccaaatcagtccgcaacagtatgtcctgctgctttattgggttcatatgatgaataagaatctttccacgaatctcataaccatccaatccaaggtcgcatccattatcacgaataataatttttctccgaatgtccttccattcttgagaattgtaaaatatctgattaagatacctatcaaatccgaatgtctcttcaccaaccactccatccaaacgaagatactcgtatcgctccttaaaggttgtaagttgcaatagttccgaataacatttaagcatcatccacctcatctccatgaccgctataaccacgaaatgcttttaatgcatctgcatacagcttttcagaattttcaatggatttcagattctgagtcttcgcctctatcagttccttctgtttttccaaaatctctttttcaattctttcttttgttgaaccgagcttcaaatagtgagtaatcacctgcgacgaagcggttccctctcgtaactgcttttcagccaagtcaactgctaatgaaacaagctgattttctctcgcttctggcgttaatgctggacgcatcatcctagaagactctgattgctttgctttcctcaaagttgatgcctccttccatttagttgttcgctacttctgtgatggttttcgcatactttccagtatttaaaaggacctacaaatcatgacaatgctactcaacgaaaggagaactaactttgagccgatcccacagaaaccgttgtcaaatatcatgagttatagacccttgtaaatactggaacagctgaaaaggctccctaaaaatgccctccggggaaattttaaagaccgccacgatatgggtgggggtatgttttttagacacccccctataccccttttagttatgtactggcggtttcggcttttgatatcccgatgaaatcacttttaggaagctttttctttatgttcatttgtttctgatttacttgtaacctttcgatagatattctggaaatcataacggattatctcgtcaatggctcgctctacttccttgttgttctcttcatccgataactgatccgatgttcgagcgattcgaccaaggtaagcagttgtgtgataacccttttcctcatcgaacatgaaccattgagtgaactgttcaaatggatcataaggattatcaaaagttgtaagtgcaaacctcatcttacttagttcactcctttccattcaaatacttagaaactgtcgaagaagaaaccccaagagcttccgcaatctctgaagtgctatagccagatgcgctaagtgcagcgatacgattctgtttagctgtgctcagagcagtgcttgcacgaggagttgctctctgacgaatagtatcggcattcgtgttattcagaatttgtgtaagcttattctcagaaattgctccggcctggatagcttcccattctttatccgtaatttcaatgttagatctcttggctcctacagaacttcttgcctgtgccagagcctgctgactagccttcttaacttctgctttcgtcatatccggattgtctttccttttagcagcaactgtagcattcgccattgtctgagcctgtctctctctaggagcattcgccaaagccaaatccaacttagcatttaaagactttacttcttcagaataagttgccttagcagaagcagagtaagcaattttgcctgtactcatcatctccctacgagcctggttagctaaagacttcatagaattcgcatagtcggcataagcttcttcctggggggtacctgaagaaagagtacgggcgtcttttgtttcagccatctttgtactcttctgagttctcacctgaatttttccattcttatcgacatactcttccttaacagacttgtatgacggcgatccatcttcgttgattgtcggagagccttttctcttaagaacctgtgtctcagattttgctcttgaaattagagtagatgctccttcatggtaacgaccttctgaatctacatttccctgatacttcttcttaagagaagcgataccattgtcgatttcactctgcttataatccagtttgtgtttctcagcatcgattactaccatactgtgacgaaccgctctcgctaattcatcctgtgtggctcccttcaaagtcatatcagtaatcagattcgatactttacccatttctgtctgagtatttctcataatcttatactctttaccattacgataataatggtctatgccatcagcatctttcttaacagttccaccataagcatccttggtatcgaaaccttccaaaccttttaatggagaagtggaagtaatctttaccttactctttgtggagttacaaggaattaccattacggtatcaccatcaaagtccgctccggataaacggtctgcattcttcttattgataccgattgcatccgccggtgtatttccgagaacgctctttccttcagccaatttattgttgaccttcagaataggaatctcaaaagttccaccatgcgggtatcgaatcaaagcaactgtttctccatctttgtagtttggagcatacacctcattgtctttgattgttgttaatgggagaattacctgatacttctgacgaggtaacgccgctgcctgcaaatgtacggcggccgcatcgcaatcgtcagcaaatgattttaacagagccttctttacagtggggtttgttaatgaacagatttcatcatattctgcctgcttatcagcttttgccaaacctaactgctttttgataagtgtcaaactctgcttagaaagaaactgtgacggaagtgtcttactccattcaccccaatcgccttcttctgctctcttattgatcagagaaagagactgtttttttccggttacaggatctgtatacttaccctttggatcatcgtaatagctctgacctccatgctccttaatcagggaaccaaacggattatctggatcatccttaattttcttgagaacatcttttgtaggagtgccagactttttattagtgttgaaaatcacatcaacgccatccggcatattatctgagtaaacagccatacctttaaggtagtgagttccgtcaaccataatacggacctgtgcataatgagaatcacctaaagacaggtctttcacacctctacggagttcaattacaccatccttatcaacgccaccttgatcggcatagcggatctgcaagcgctttgaatccatgctggccggatactcaaaagattttctgaaagactccccattgtcataggagatgtagtctcttacagaatggacattctcgaagtcataaatatctttgtgctcggttcccggtggacaaatgaccttgatattggtctgctttccaggattggtaacctgtggaacgccgccgccataaatcggataaccttccaattccagcatataaagagcctggtttagtttttcttttgacacgccaagttctatttcaacgccggttccgacatcgatcattcccttttcttcaatgagttttcgcagaacatccgcagtggccttagcctggttcattctgttttccgaagtttcgttcaataaagagcggacagacgagtcattagcaaatcccatcttatcggcaatttcatttaaactgtaacctttttcacgaagaccctttgctgttgctacctgaagagcacgacgttcatctttagcgaggctcatctgagtacgaagctgtgtggtagtcaaacccatattcttagcaatgtctgtttcgctcattccggatttttttaattcctgaacacgactaagaaaatcaccgctatgctgatatggattctctccagaaccataagggtaacgcccagaacgccgtggcataccataatgcattaaaatatcttccacaatggaattcatagcttacccctcctgttctctgattttcttaatcaccttatcaaaagtaataattcggtccatgattggaacaatatcttcagccgttgggttatgatacagaatttcattgttctgatagattctcaattccatttcaatatccccaggcttcactttatattccaaacaaaaaagagcggcatatatttcaagctgctccatgtgcgccggaatctttccggtcttcaaatcgtgaattcttaagaagttattccgaaacaaaatcgcatcggctgtaccaaaacaattatcggaatagtaaaggatctgctccggtgtcatcttaaagccgatggcatcattcacatacatatttaatgtctgcttcgattttggtaatttctgattgagcatgatgcactgtgctgcaaatgcatgtaatacagttcctttttgtgtggcaaggaaatttcgatatgcttccgcaactttatcctcaccataatttatccagtgatatttactggcaccaagaaaggcgtgttgtccttcaaggttcgaatgattgttgaagttcatccagtacctcctctttattctctggacatataaatcttgaaaacgacatctgattcatacgatccacataatattcctgattcggctgcttctttgcgccagcgctttttttacattctaaggaagcccatttgtctttgtgaagaaccagcaaatctggaatgccctgaatgtaggtcgggtcatttttcatcacgatacaacccggaaatctttctttcagttccttgatcaaatttgcctggaacttattttccaacataatggagtctcctttcaattttctaaaaactcaaaagaggatgtggtatttaataaaaatgcctatttatcctctctcttcataaaagggcatgtttttttcgcgcgcaaaaaagagcataaaaaaaagacagagacacgattaagcatctctgtccaaatatgtagttgtcagctgttatttcttaaataccggatcagtatccaaatcaaccataagccaccggtacacaatgtaagaatcacatcaaggattaacccagccgtgctacgctttttctttccacctttactcatctatcgtttctcctttctcagcttctatagcttttcgatctttcttaaatatctttcctaaaccactcttagcagaatccatagtttcagaaacactttctttcaaacgttctttcttctcctgcttctcagcggccttctgttctttagcctcctgtttaatacgaacgtcatcatcaaatatcttttggctctcctcgataacttcagccgttatgtatctcagacaaacagttgtaccgactttcaccttagcgccctgcttaggatttgagtctatgacttgggtatcctcgtaatctcgatactttggatctgcttctttcatacgaagcttactctttgaaactttcaagccacgttcggttaataattcttcagcctgttccaggtctatcggaaatcccttacgatataattctggaatgataactttcgtatctattttttcagtcggtttattctgtgcgttatctattgctttttcgaccaaaggtgtaaccgcagtaatcaaaccgccaacagctccgattgctcctatgacacccgaaatattcttattcgatttcgttcccatacaatcaccctttccatacttaagtaggaatttagggcaaataaaaagtgcgccccaatttgagagacgcaccgaaaaagcgcatctcttattgttgccacacaatcctcttcgccgttcaagggtacgagtaaaagagaatacactttttaccaaagttattccctcgaacgcgatttcattattagattgtgtggctcttatagtatagcatgaagcacacaaaatggaaagtggattctgtagcaggatcctatgccacaagcatcttagcacgctttgccatatcatcgtaaataaccttggttccatcttccaaatatacgacaatgctcatgtagttgtacggacggtaatcctgggcttctttcgataaccgcggatacaccgatttgaaattattgaaaatatctttccatgttacctttctctttacattcacggcaaacctcctatcggatacaattcaccaaatggatatccacaatacgaagctccggcacctgaataaaaatccctaggaatggtataaccgaacatcacatcttcaaaagattgatacggcggattatcaacccatagccattcttgtgatatggcaatttcatttttcatcgtcacatgtgcaccattcggaatatctttattcactcgtaaatgatacggaaaatgttcgcacaaccaatcctcgaccaatttcttatcgtaagtcataaaatcacctctttcttgcttctggtcaaaaacccacttttatccgcctattactatatatttttaaactttctatcataatagtttagtattaaaagtgggaaagtgggcataaagcccgcaaacccgcataaatactgggtttttgctggtcaaatccgggtttttgaaagtgggcaaaaccgggcaaatggccagaaatttgaccaaaattcataaattttctccaaattgacaccgatttttcagttctggtcaaaaatatccgggatttggtcaaatcctaaaaccaaaaagtgggcagaaaaatgacctgttactacaaagatttttaacctagattagctgaaatcggtcagaaattccgtatctgatagggcaaattgcgcttcacaacaggcttataattgtacgtagacatcttagaatccggcacacgccttacagatttaagcttccgaccggtgcgaattttacgattctcttcctcagaagcatacatacgtccgaaggcttcacgcaaatctttagccagtttctccatcggctccaaaactttgttccacgcctctgccaaagtttcgcacgctttctgtaattcttccatagtcatcatctcctcgcctacctccaaacctttccagttcttttatccttcaatacaactcgtccctcgatatggaaatccgccaattcgcaaagtgaaaacagggtattcagtaactgatgaaatctcatgtcatccttgtcctgttcctgctccacattcttaatcgcattgtaagctgtcggatcattgtaaccctctgcattttttctgtcatccttagctatcatctctacctccccatctcatggaatcgtccatccacattgcagcattcataacagacagaacaatatatccaccaaaaataagaataactgccaaagtgataattcctaaaattaaatatcccatttacttaccctccacttcttctaatcgcacaccgccgtacacccaaagatcttctttgagtttgtccatatccaactcatcgttttgccacttttcataatattcgagaacatgctctgtaaactccggaatccgctttgcatatgtctttgtccaataatgatccatcagcacttcaagcggcagagtaagcagaagaatcatcgcctgattgatagcatcattcgtagcctcctgcttaactctatccagttcaccagatatcttttctcgaaccagggcatctaactgagctcttgtcagattgtatgtagcggtcttagctttctgctcacacttctgtgctcttctcctctcagcccggcccataccgccgcctccttaatccataatgcagttttctctcgatgcaaagagcataatacccaccatcaaggcaaataaaaagaacgttgcatcccactcgatcgggattgtcaacgctccaagtatgataaatataattccgtatatcttattcttaatcaagtctcttctcaacattgtctttctcctctttttgacttcgcgatgccagctgctacatcatccatttttatcattactccggcttctctgaaccgtccgtatgctttggctgtagcacaatgctcaatacacttcataatgcgatcaactaaagcgtaaaaacacacatagccgataagaaacatgatgataatctgaataactgtaaaatgcataagtttaatcctccgtttttcttttatagatataaccattgctactatttctagccgctccctgtaatgcgttaattgaattgagatctaaaccagatgaagacataataatctcagaatatggcagtgtctcgatccacttgcagaaatcacaccactcatccagcttatgtcctcgacgactcttataaatatttgccagaacttcataattcatcatgacattgcgcgtttgattatagctgctcgggagaagctgaatcatctgccaccaaatatctttcttgctcgggcaccctttaatctcaaaatcatctgcgttatattcaatatataattttcgataatcgtttaacgcctttattgtttcttccagtaatgctttggtgcggatatcgagatgctcacaactgaaatcatccattgtaaattccttagcctggattttatgcatggtactacagctgttggcaacagttccgactttgtaagtatcaaattctttccaccaatataacggtgctgtgatccttacgtacaccggcgacattctcataaattttctatgatctgtaccagcgttagctaagcgttgcattagtgagcgatcgttctctccaagatcgaatcctacaatatcgtatccagcagtttcatactcactatcactcttcccccagctgttcatcgggtttctcatgccttcgataataaatctcatttgttccggacttgccagaaccacatgctctaatttaatcatttttattcccctttcagaatatccagatccccaccaatctggattattatgctcttgtgttcagcatagcccacggttttaattactcttcttccttctcataaggaatctggatcacatccccaccaggaaccgtgaccgactgcataagctgaccggtttcctcatcgaagtaaatgttatccattgcgttatcccactcttcgaactgctcagcgatgtttctgcctttttccttacgcatgttgataagctcgtcatgaaccacacgtctccaggatctcgcaatttccatacggctttgagcaaggatgttgtacagaccattctcagtcacaaagttgacagaacgtctctgacctgctactactaaaggtagtttcagcttctcatcctcttcacacatttcgagcattctccactcgttaccgctactgtagccgatagcatgactaatatcttttgccttgaacagcggagcatccaggtctccgtatacattgaggcgtttccctccaaatgaaatacttccagcaattttaatctctttactcatctttgtttgttcctttctctttgtaatttaacgtctacagccttctgcaactcttctggtgtaatattaaaaatggacttaaggaattccaggcaaatataagcatctgccatctcttccaaaagtccaattctgttatcataccctcgaatctgtttactgattgcttgcgtaagttctgcgaattcctccatagcaatcgtacactttaatttccacggctgactctcaacgcttcttctgataattcttcgccgctctttatctgacaattcgatattgcttttcatgcactggacaaatctatttcgatccatcggtttcccccatccgagctttagcagcgtcctttcgctctttgtactcctcttcgtcgatctcagcaaagccgttcggagcttctttaaaatatctgttaattgctaccttgtccatggacggagtgattacgtacagaatacctacggtatcgtaatcgcctttcgctggatctacaaggaaatcctccgtataaatcttaaaggctctatcagccggcatataaggcatagtgatcggatacagttcgtccataacagtatcgatcagtccactgtgatatggagcatccggacagttgatgttcacgccatgatagcgatccacgtctctgtacttaaccgtgccatcagcatacacgtacttaaataaggaagacatgcgtttgcactgatagttacgctcttcacccttcagaccgctcatatcagaaatatcactccatacctcgtcgatatcctcaatcggaagaagcggcttgttgttgatgagacggttcagaatagccttagtcagaccaatgctgaaaccggaatgaccgtcattgcacagagagccaaaggctttcaatgcgctttcataacaagcacaaccataatcccattccccgtcttttctatctggattctctcgacggcaagcaatagctacctcattttcagcccaacgctccatgctagatttttcacggcaggaaccgatagagcggttgcgatcgtctatgtactcatttgcaaatatctttctgcaatttccgccaaatgcttccacgatttctggaaggttgtcgtttacagcatcgaagatcagtccgtgctctttacaccactccacagcctctttggtctgctcctcgtttctggatgtccaaaggatcagtttttctccgttagcctgtctttttttcagatactcgataagctcctcgttcggcataccaatctcaggccatttgttctcacataaagttccatcaaaatctactgcaataatgttctgtttcatttctaaattcccctttcagttttcaagccattcattatcaatatagtaaaaaccaaatacacacagtccaataacaattatccaaatcacccagaataaccatagttcccaatcgctttccaaataatcaacagtttcgtcaatggtgctgttttcataaaatgaagaattatcagatatagttttatcctgtaattcggtaaatatggttcctgtatattccgtgccaactccataatatttatgccggacatggctcgattcttttatagtgtcaatatgttcggtacttggaaactctaccttatttgagggaaagatatgccctaaaaatgtaatttccaaacagctttgttcttcgctaccagcataatcccaagaccaataagtttccgttctggtatgtgtctttcctttggaatcggttgtggtgacggttcgtgtatgcatattgtaatgttcctctattttttctatatacatatactccccgttaatttctggatatgaaacagtatccacagccttcaaatctccataaacgaacgcataaccgacgttggttctcatcccatattcaaacagatcagagctttcgattttaatagctttattatacttttcgttccgatcgagaatatagtttgaaattctcccagaaatcacaaaaccaatgagaagcatcgctgcaattattgatatgcttgccaaaaactcacgcttagtaatttcaaaatctccaaaatcaaagcctctgttcttcatagtatcagtctccaaataaattttgaggcgcatctaccggagcatcataatcaaggtactgatactgctgcatttcatatcctaaaatgtttaaaaataatctagttgggaattttctagcatagcgattgtattctttaatctgcttgttataattttctctatactcagcaattaaattttccgtaatggataactcattcatcagttccttgtaattttcattggattttaattccggatatgcctctgtaacagcagcgatcgcagtggttacattttctatactggttgctttttccctaccctcgacaatagctgtaagtgtttcagcctcatgcttatcgtattgtttgacacaatccgcaagattgtaaacaagatcgactcgtcttttttcctgaactttaatgtctgaatccgcagtgttgacctgttcctccaatgcgaatgctttgttttgtgctccctgaattccaaaaatacacataaaaataaccgcgacaatcccagcggccacgataagtaccagtttccaattttctttaattgctttcatctctacttgtcctccttaataatcccgataaattccactcgctcttctgccagacttacgaaatacctttttcccttataatcgacgatgtcaccctcgtacttataattcttgtccggctccgaagcatacgctaagatgtttatttttgtcgttctattcatagctcctccaaatatcaagctccaggttgcatggctgattgatccgcatactgcaatgcctgaagttttttcttcatattgtctaaaatatactcgactgtgattttcgttgtctgcgccagttttatatacttagaatgttcctcgtaccacttgaatatctcatagagatttccactctgccaactgaatgaccaccaatcgcaaatcatctcgatgatgtaatcgtatggcatttccaaaacggtctccagttcgccaccttccatatcatcatgaataagaatccagtgctgccaatgatgaggatttctgtgaatatgaagtaaccatgctcgctgatatcgctgtacaacctcataagagcgattatttccatagaaatatgcatcgtatgcctcatactcatccggttcgtttttagactgatcatgagcaaattctgtattccacccggcggttagggtgtttgtcataagtcccggtaaatttttagaaagccagtcgaacccccttttcacattagctcgatgcctagctaaatattgatcgtattgaaaactcacttttggccctccttctttttctttgttaccagcttttcataaagttctctcgcttcatctccctggaaagcattgataatctcgacagactgattcattcgttttcttcctacaaccattactccagtgtcatttttgtttgaaaaatcaacactaactaaaatactatctaccattttcagcctccttccagtaaataggtttatccgaatttgcgttcatcggttctgccaaacagtcattacaaggatcaaatttttcttcgagatccttatgttcgcaggttttgcaataggttttgaaatcaacctctttgtaaatattttccattggacacctcacatgtaatatcttaacaaaattgcatataatctttgttgatagtcacactctattagcagactgtaaaaatcttccgcagacatacttttcaacttgatagataaaatttttaaaaatatccacagattataaatcattgtctccacttaacaaacctcgtttcattaaatgttttcttgtccttcaatgctttactgatggcaagatcaataccagacctggatttcaaatgatagtaatacagatccgtatatggtgtattcatcctgtctattcgaccagcagactgtgccatgatcttatacgaataattctgagaatagaatataatcgtgtccgtcgtaatacagttccatccttcagccccggcattgtactgaactaaatatacccatgcatcgctagtcggcactggctgatgtttgtgaccgttccactctccgacttcgtatccagagaatatctccttcagaagctcaagctcataatcgaaattgtagaatataatcgctttcggatgcttttccacaatttcaagtaaagctatttgtctggactgatcggtgtttacaatctttctccacacatagcacagaccggcagcattgataattggttcttttttaaacgggtcccatctggtttttccgacatctttatacatttcgatattgtacttgacaaaaatatcctcatggtgcgaaaccgtctggcgtttgaaatccatattcaccaagattttgtttcgcaatcgaatcaatctaccagtattcaaatatcggtcaactttaggaaatttgctgaagcgactatagactatatgctctcttgtaaattcgcttcggtttttataaaatccgttagccacaaacaccggaatataatcctgccacgtatcaccaggagttgcggatagtaatatccactcatttaccttggcgattttcaaaaatgctttaacccatgttccagagcctatgacacgctgctcatcgaatataaagaaagcatctttgacatctgcatacttcttgatgttgttccaggaatcaatcacaaccttattggtatataaattctcttctttatccgttgataatagaaatggtgagagttcctcttcccattcaaaggtatctcgtttcctagcggttgtgattatgtacaaatccttaatgttcacatcgtccattggaacatactcatccgttccaagctctccgccatttcgaacataatagtaggccagcgaagttctggattttccactaccaacaccgccacaaagtatgcagccgtttcgcatttgccgtacagcatcttcctgatagtcccgtaattctacgccagccattacacacctttcgtgacaaatccatcttctacctcgacttcgtagccatcgccatccagatctgctttgggaccatacaagagcatacaggttgttatggtttcatcgctctgattctctgaatgatagaacttatataagcagtccagcacttttttagtgatagataatttacggcaatcgtatacagctttgcttacatcagaaatcccaatgattttagcaacgttgtcataaagctcgctgatgccgcacgtacactgctcttttggaatagaatatcttttcttcattcgtcatcaccctttccaaataacttgttaatctgacggagcattcttcttgtactccatacatctgagaaatacataggtgtataccaatatttttcagatgaatcgtccgtagatattgggtcagttatcgagttacctatttttataaatccagccaatccgagaagcgagatttggatataacacatcagaccaacgatttcatcaacgtcctgtgcaactactaagatatggttctggtagtttctcggtggttcacaatgctccagctgttttcggattacatgcacaccagcaatcaacgtcgctccagcaccgcagcatggatcgttaatcgaaatataaccatattgctctatcttttttaaagcatcagtcgctaccacttcggccataagttcacaaacatgatacggtgtgaagaattgacctgccgaacgatttccaagatccaaccgcataaacatttttccgaggaaatcctgctcttgattctgatccagggccatggttgtatacgctgctaattctggaaatatagcttgctcttcttttgaatactgatgaataatttttagataccgcttctctctttggtcgtagttttccttgtccaaaacattcgagattgaacatgcatgaagtaaaatataatctctccacacatcccatgcccgatgtctgtatgtaagtttctgaaaagattttaagaatttattttccaagtcaattttgggttcggatttcgtagttacttccggtggtttctcatccttctttttcgtttcaccgaaagttggttgccacttaggtggcggttcttttgctttgaatgttttaggtaccgtagtcttaatctgtggtttcgacttcgtttttttcttattccaaaacataatttttctcctttcataaagtaagagtgccggctttgacaccgacaccctcaaaatatgatttatgcgaacggcggctcctcttcatccgcatatttctcagcaaacacgtcctcctcaatcgtgacgtacatggtcttcaaatatgccttaatgccggattttccattcacttcccactttgacgggctaatgaccaaatcaacatttctgatttcagcatagtcaagagaagatacagactcctcatccaactttgttttagctcttctggtaaccatatatacattcggcggaatgttatcgaaccgaacagctacctgaatatagtgaagaggttcttcatcctcatctctcggcggaaggattcttacattccatccgtcttcgccgagcttctgcgcctggtctgcatccggaatcacaacgcagaagttacggttacctgctctgttgtacttagtctcttctcctctgaaatttctgaacataatacgagcattctcaataatcagctcatttacatttgctcttgccatgattaaattctcctttattttttaattttccggcggattcattgcgtgcttcatcacgatatctgaaatatcataatcaaggtcacaatccatgtggaagttatcattgttgaaatgcggacagtcgaagcatgtccgatacttatcctctccgcaaggcatcgcccatggaacaacacaatcgacatcagcgtcgttggcgccaagttctggaatatacggatcatcagacacaaaccactcaaagtctccgtactgagaaatagtttttacagcctcatcaaccagcttgtcgtagtaggatcggtcaatgccgtcttctttaccaagttctttgaccatctctgattccatccaacgataacctttagaaccagttgcagcatagtaacgaccgtctttttctctcatcagaagtccagctccatatccatctttcatcggacagaactgaccaacctttccaataaaatgatagtcgtgccctttttcaatcaatggagtaagcttctgacatgtagcttcaaaagtggtgtcggataacaaccccttcttatagtcgctctctgccttgctgaattctttttcttccttactgacatccggtaattcctcattcagatccaaatataaagagctactcacagatttggtctcgcacatatcttcaaatgcgatgtcttctctgctgaacagcttcttaaatacatatggaatctggaactgagtgcccgttgccgtccattttccgcctttctttttgttgtcgccagggacataaccatacatcttctggcattcttctgccgatttgtactttgcaatatatacggcatcgttgaccaagcacatccgatcgtacgtagcctcgtgttcaaatgtgtatccatatctctcaccaaagtccatgacaaactgaatgatctccggtgtagcatctggaatcttaatagagtctgtcttaatatgagcaacttggaatccacgcttcagaacctcattcttaaggtcaatcatgaataatgctccacgtttcgccacaatgttgtcgatgtttcttggatcgcggaacggattatcaaaggatgccgatgtaagaccgtatactgaattgatagccgtcttaagcgcattggcaagatcctttgatgtcatctcgccgtcgataaccctctgaatatacggagtaagcttgccgtccagcatggtattaacaatatcccaagcctcatgcttaatacttacacgaccctcaacaatatcacggaacgccttcgtaaatctcggtccaaacagaacctctgcaatagcactatgcggatgcattgaagaaatatccaggagtgctgcatttccatacattccgggtacgccttgtgcaaatccgccctcgcctacttcttctccacgatatgtagattttccatggtcgaatacatacccagggaaatatggaagaatgctgtgagattcaaatggaacttcgtccttatcgttgtacttccaaccatagtgaggctcctccatcatcttcgggcaggcttccttaaggaaatccatactctccttatccagcgactctaccggttctgccagatttctgtaatggaactctgactggggtttccggttgtttccaaatataattctggttgtaagtgagttcgttgtatcgttaacggtcatttctgctaaatctgccagaatctgtcgcgccgtccagtcagcctcaagataattaaaggccgcctcagtagcaataacatcgttatcacaatactcagcgaccttaatccaaagctcttccggaaccggttgatcccatggaagaccaagctcctgatgatgcgttcctgccttgataattcttattttttcatcggagaatccttttttcttgagatcgtcatcggtgaggtttcccatctcgatttccaatttcttaagactcttcttattaccagccgaagcgaagtcatacacatccgtataggatacattatacgcttctccaaagaaacagttcggacttccgttaatgatcttctgcgaaaggttgtagagctgttcgtttgtataacccatcaaccttgcgtacagaatatggttatcatatctccgacagttaaagccaaccagtctgaaccgcatcagatcctcgatctcactcggagacgggttaatcattcttacaacaggctttccctcaccctcgattttccagttcacaaggaataagtttgggaaaacctcaatatcatagaataccagctttgcatcatcgtttttcaccgctgtggacggatctgcggacttaaactgcattttgttgaccaacttaatacagtaatccgcttgatgagtgctattcgctgcaaatgctaatactgcattgcgcatgtctgtgacgtcgtacttcaaatcgctttcatacgcatcttccagtatcttgtagataaaatcgatactgggcttagttcccggatgtatctctttgttaagattccgtttgatcagtgttctaagccctttctcgctcttaatcgcttcaaaatttaccattttttgttctcctttcagcggtaaaccagagctaattgttgcgataggcaaattattacactttgacagcatacgccgtaaagagcttttgcccgtgaacaccttaacttcaacatggtcgtcatatactctgctaagctgcgtcggatcgccggtataaatataatgaagatgtataccttgtcctgatttactaagctcggcataggtaggcggccacttacttgcttctgctaaattcttttcaaatgacttatttccagattcgtctggaatatcaaagtcaatcacaatatgattctccggaactttcacataatgaagttttttcgtatcaattccagataatttcgtgcggacagaatcccattttttctgaggtgtttcgttttccgaagcatactgtgcagggcattccgaacacacatcatcaaatatagattcagtgctatcgaattggatcagtgccggtttgactacttccgccttttcctctacagtttcttcttcaaatttttctgttctgaacccgatgtaataacttctaacgcgagttccatcatcaagattgaagcgttcctgaaaatcatgaaaatagtttttaagttcctctttgaataccctctgtgaaaacgggagcccaactttggcgtcgtcacagtatgttttgtacatctcccatgcggctttcagagttgtcccgttttctttcttaaatacatggtacgaatcgataatgaagttatagaaatcattagatgcaccaagcatcgtaatcggaatataatcgtcataacgaccaggattgttcgaatatacctcctggcagtggtaagcgatagctcccaactcaaattccacttgcttcacaatcgttttgtactcttttggattcagcttatttccagacggcgatacatcgatcaatcgtcgaatcagaccggactttgcatccgtaatcttgaccggcttatttgttcccataaacaggaaacatttgaaccggtttgagtacgtagacttgaatttttcgttcacagtcatcagctcatgagataccaagctgttcaatctggtattatcctcaattctcgataaatcgccatcgtgctgaatggcaaccagagggtttgttttaaatgcttccaatgcaaatgaattgctggaagatccaagtgcttttgcgtcaaatacagaatagtatccgtcgaaaagctgctgaataatgttaagaactgtggatttacctgttccagcagctccgtataaaaccataaatttttgcagttttttggattctccagatacgattgaccctatggcccactcaatttttgtccgctcttcttccgaatataaagtagacatcaatttctcataggcagacaaatcgccagcttcaagcggataattcaactttttgctggcgtagtcttttttattagtttctgtattggaaaatataagtttgtcatccaacgtatgaaagctgtccctcatctgcttctgacaatacttatgccatgagtcgatcatacccgactcggcatcccacatatgcaggactttaatatcggagttaaaacgctggcggttctcctcagcatatctatccagttcgcggtcaatgagctgcaaggcatcttgctcgtccgtagaccataaaccacgttcctcaatccagatagcatagaaatcaccacctcgaatcattagatcggtgctttttttaataatgaactttggatagatttctattactccacgtttcgttgaacgtgttgaaatcaccataaagtcgatcatcgcattttttactctccttccggacgcttaagttcctcgatttccttttccagttttctgatacgcagtgcctggtccttctgctcgattttcataacaaccaagtttgcagttgtcatgacagcaaagattgtgagctgcttattgaagctccgctgtttactgaccgctcttgtaacaacgtccaatcttttctcagatgaccgtaagctgctaaaaatataagtaagcatttcgcccattacttcttacctcctcttaatccgttcatgaagctctcaacagtctcaaaccgccaatttccttcgttgttgaacgtaaatataaattcctgatggttcttctgacggatgcgaatactgttctttccgttctggaaccaggtttccacattatccccagcgtactgcggaaaatataactcgaaccacttgtatacctcactatggctcataacgccctcctatctgatattgtcgagataccagttggcctgataccaaatctcgatatctctcatatcgtatctgcaatgctcgattgtgaataatccacccttgccatcccgtccgtagtcacgatccaggaatcgccgaataacatcgatggcatgagctttgtcgaatttggaatcatccatggaacccaacccaaggctcactatcatatcccaaaaccactgacctgtccgattaccgatgtcaggatcatccatgatgtgctcttctaagcgtatagcaagggcaataatcatttctaaaacactgcacggacgattatccaaataacttgcaatcatactatcccggtatccttgctcgtttccgaatctatatcgaagatcgatcccatcgtcatagcggttgccatcaagagcaatcgtatacgtaaaatccgtatcatgaagcaaaaataacaacttacgatacgacaaacctcgcgaatattcatcgtcgcatacgagctggtacatccagtcaaaatatgcattgttcagctcatcccgtgtcattatacctccatctgatgcggcatatcttcaaccacttcagaataggtcctctgatcaaggagaatttcgtaatcacactttcttgcgtcattacgaacaaagacagagtcgtcctcatactctccaaaatgattcaaagaatcaattccaacagcatcttccacatcttcaattacttcatcgttttcatcagccagtacaccatctgcatagtaggtaaggctgatctgctcatactcttcatcgtcaccaaactgctccggcggaatcacatacggaccggcttcagaaacaggcttttcttcctcgtccgaaccgaaatcagaatatcgggtgtaaccctcttttttcagacgttccgcatactctttaagatctggtttttctttgtccgcatctttaataccttcagcaacggttttctttacggactgatcctttaattcctgctcacgtcttaagaaaacctcttttacagaatcaatttcctcctgagcgagcgcttcgtatttatccttaagcaggtaccatgtcactactgatccagtcgcagcaccaatgataaatgccaaagaaaacagagatttgttactcatcttcgtcctcctcgttctgaattgtcataacggtaagcgcaagcccaccgaaaagtaaagaggcactcaacagaatgccccctgtgatatgtctttttcttttggtatccaatatgtaatccatcatggatataaaatttccaatgccatccatcagtgatgctcctttccgcccataagaacggccagaccactaacaaagcaaataccagcaaatgctgaaaatgttaatcccataaaacctgtcataattcaggactcctttctattcatagctcgaaaaataatggttacctacttgaaacatcggtcttccgtattttccatattcaccagccgtgaagaatatcgtatctacattagttctggagtgcaattcctcttcaactaactggcaaatatcatcgtctacaaagcacttatcaattctcccattccacatggatgaaaactgatttgcttgatatacaacaccgtacactgtatccgggaaatatacggaatcaacacgatttaatatggtgtcgatcactaatcgctttccttcctcgcattcgccctcagcttctgccatagttacaagagcaatcagctcaatatcttcccgtggcaatagtgtatcctccacatactcttcgatttcaactgccgacaccgtttcctctaagggttgctcagaaataattacaataggatcaataggttcagcttttaaagtcggctgtatttcgatatattcataccggtttacctgttctgccgagcagacaaaacctgtgcaaataatcgcaaatacgcaaagagcaggaaggaccaccatacgaatataatttcgcatatgtatcctcctcaaaaaaattagatcagatcgagaatcggtccgtctacattgaactccattagaatggctttctcgtaaccaccatcctcagtttcacggttggtctccagaatcccgaaatcaacgaagttgtcgccattttcatttccttccggtttataaacccaaccaacaatctggctcattttggtacgcttaatgccaagctgatcgtatacatcgctgaggaataaatatccattagctttaagtttgtcgtttgccagattctgctgagagcgcagatacataaggttgtaatccatattggattcatatgcctcgcaggactcatcaaagaaacgggcgtaatcgttcgtagaaggtgccgccacatctacggcggacttcacctttttttctttaccgctgtccggatcagttacagtttcctcaaatttctttgccttgatgttgtagcgaagttctttatcaacctccgcaccaaagcgttcaacgactcgatttctgtattccttgaaagtcttatccacagtcgcataggctgctgccagtgctacatttctcttcttgagaatattgtgagacgcaacaatacttgcgatggataaagttccaagggcaacagcaggagcatagagcttagcaacttttacgccagcctgtacataaacaatagccaaatctttctttgcatcgtccttagaatactccgtcgccagttcctcattttcagcacatttgtgaatagcatcaatatctttcttggacttctccaatacgctgtctaacttagttgttgcatggcaagccataacagcacttgcaacggtaccaacaacaccagccactatcagaatctcagggctatgcttcttaagtttcacacttactttgctgaaggtcgtggaaacgttcttcatgatttcttctttcttcatatcagttattctcctcttcaattttttctttcttcaataaatgatcgatcaagtgctgcgtgtaccacatgatctttttcaaatcctgaattccgtttttatttttccagcggcacgcatacttgataatgttaccagtatcggttgcttcgataccttttaaatcgaaagtgaatgcctcaataacatcgatcacttccaaacctgtttctgactgataatggctcggatgagacaccattttatcgtctgattcgtacataaatatccctcctagttcaacggtaatgccttcggaagtttaatcatgtatccgtctctcacacgaattacagatgcattccgaatatcagtccagccgtatttattgtctgtatagttgccagaaacgccaaccagatcatagaaatcggcgacactaactacctggtatgtggcaataagctcgtccattctttccaggacatcttccgcctcgccacgagattccagaataatatcatcataatcgtatccagttcgtgttcttgatacgtttcccgaatctcgtcgatcccgatcgtcataatacttacggtaagagatcttggatgacgttgacgatctcccgccccttgagtttccgctaacaccaaggaatgctctgacagcatccaagataatgtcttttacggctggaaccacgatgtcttcaaaaatatagctttttacatcgtctacatcttccggaacaaatacgttcgtaatcttctgaagaccattctttttctttgatttgacagaaccactgacaaccttttcaactcttttctccggaatatcatcattctggttctgtcgtgatttatgggaattggatttgtattcctccatctctaaatctcctttcaattaaccgttaccacttttccggggagggttatcctcgtacttggaatacggtttgttttcttcttaaactgatacaccagattactcctggctttcttttcagacgccgcgtatgtagaaccctgccatctatttgcaacgcaggtatcaaactccataaccggtccgtcgtacatatactgattcataggacacctcccttaaaaagcaaaagggaaagcaccctgttataggtactctccctctgtccgaatcatcgattcaattcttattcagaatcctcttctgtctcttcatcgatatccgtaaactctccgtcgacgatatcgcccttcggctgagttacaaccgtcttacgattctcacgccagttcttgaattttgctgtggccggaacgactacaaatttgtaggttaatgcacctgcaatcatagccaatccgatagttgtcgctttcttcataccgccgttagaagccgccttcacgatctcctcagtagttgtttcgataacctcttcgttgttgttcatgatttcgttgttctccataatatgttctcctttcagatttgaaatatgtggttcttccataatagtgtttgtaaattctgcgaaccttacattaagttgcggaagtcgtatcttggaccatatccatagtcgataacaagacaaggtgttccgtccgtagcaagctgagaactgaatctcagatcgatatatccattatcaatattccagccaagatcatcaccaagcttgataggctctaatccaacctcataatagaaatcattaagtgaaatatacatttcatctcgcatttgacgatttaattcattctcggcctttttcaatttgtcgatgtctgacttaaaatatcttccggacacagcatcaaaacataaagtatcgccttttgctgtgacgatgacctccttattttcaacaggatttttctcaaggcgttccttagcaaccgcgtccctcacagtctgttcctttttctcgccgattgtctctactacctttttttgataatctctcaacgttgattcggaaatggtgtacgctgcggtcagtgccgcatttcttctggcattaacggaacttgccccgataagacaagctactgatactgttccagtaactgccgcgggaatataacatttccaagcagttttaacgacgtccatcggctccagtttatctgcctgctgacgtcgcttttcctcatccaataattggattgctttaggagtagctcgtactgccattacggtagtcgtaatcattccggcaattccaactccagtgaggatttcaggactatgctttactgtagctgtttttacatttctacagatcttagtcaaattaggtttctgcatttcagtctatcctccataaaatataaacggggcacaaggccccgcgatttatctaaccaaccagaattccggacgaaccccaagagagttcgaagcgtagttgcaggccgaattgccatcgtagcccacaagggcaaagtaagccgaagaaaattcctttttagtagcattgcggagccagccgaactcacaatcgtttttgtaataagcaacgcggtttcttctctgtttcataagaggaagctgctcatcgccatccgcttcgatgtgatctcgatcccatttatcggcccagccacaaatctctccgagagtcgggattgataaaccggtcattctctgcttaagaaccgcagggaacatattgtacagctcgctatcgatccactttttcagatcggactgagaatatccgccagcattgccaccatcttcattcatcgggcgtttggcaacataatcgtcgaaaatgaatagcaccttattgttcgtaactttctgaactgttgctgtaaagtttccgagctttcctaaaggaaccatcattttatcgccaactttaatgtctgctggaaggatagaatacggattatgtaccgtatctctaaataaattcaaggtcgcctcaacatcagctctgcaatagcgaactgtatcgccaatatcaaatgtcggaaataacggtcccaaatcgatcgcataacaaccctctgattttcccttttcgtcaagatcgatgtactttctatacatcctctctaccgtcggaacatcgatgcctcttttggttaagttgataatttcttctcctaatgtcatttctcttgtacacatagtacgttctcctttcagaatataaaatttttatttggtaactacgaaattagcaggtcaataatccactcaagcatatctttcgcacaagaaaaaacataacttgttcgtggattcacacatgaatatgaatcacattcatctcgaaatgattcaatcacgatcagcggtggtatctctgggtgtttgcagagtcgtattaacacttctcttccagcccatctcatataactcgcctgctcaaagttatatccacgctgaaccacgggcattattgcgatagcataacgtacagtataaatggctctttcagtcggcgattccatttgtctcctccaaaagaaaaagcgaaagagccttgttaggactcctccgcttcatctttgtctctccgggcaagtgcttcactgaccttttcttcaattttctcatccattttctgttcattcacccaatcggtaataaggtttacgcctacaccaatcacggttgctgctactccaatagccttaatccatttacttttattgctcataatgacactctcctttcataatacagcttgtaatttctgcgaatgaccagatttattcagaatcccagccggcatccggaacccaatccatatcgataaccaatacttcaagtccatcatccagtgttactttggaatggttaaaatcgatccagtatattcctgtatcaatactccatccaaccgtatctcctccttctaaaggctcaagaccaagcagttgataaaaatgattcgccggtaaatatccgctgataacaaaatcacggttcaaatgatattccgcctgaataactctgttgatggaactttcgaaatatcgattggaataggcatcgtagaataacctttcgtcattcggatcatgctcatcaaaatcaagtgaactgtttctaactaatccagttgaagtaatatacacgtccttagccttttccgctgcgatagcatcaactatcttctggtgagcctcttcgccgtacaattcctttagcttatccttatagttgttataggaatcattcagcaacgcataagcgctggtaagtgctgcctgttggcgtttactcaacacattggcaccgaagatgcagaatatcgttgccgtaccgctaattgctgccggaatatagcagacccatgctgatttaacagcttcaagtttgctataagcctctggatcaccgtcgtgatttgtcttactatccgctctgattttacgaagagcttttggtgtcgcacgtacagctaataccgacgttacgataaccccagccgcaccaagaccagacaatattgtcggtgatgcttttctcagatagattttcgacctctgagcgagtctttgaagatttggtttcttcatcatgttctcctttcgtttttatttcatagcatgtaataaatctaggacatctgtggatatgtccgctgctactgaaaacataaaattgttatccggattgatttttgaaaactgattcattattcgccggaagtcaccaacaaatgtgatgaaatcttcaaccgatccagatttctttggataaagtctaccgacgatgtatcttttcaactcatcaatagcccataccgaatagctcgatttttcaagctctttcttccatttccaaccgaatggaaaccacgcatccatctgatacgtatcgcataacaataagtcaagttgttcgatagacatccgttctctcctttctgcaaaaaataaaagagaaacaggatggactcgaaccatcgacttcgggactttaatcgtctcgcgctctaccaactgagctactgtctctcataatatgccttgtaaattttgcgaagtaaaaggaaagaggcgttgtatgcgcccctctcggttaatttaaaccaatgctcttcaagatactcatcagctcgtctttatcgagttctgcatctacatccaggtgaagatgagtctttccatcgtttatagtagtaatagcctcgttcaactgaatatcaatgttgtatcccgttttcttacgtattaccatctttattgctttggaaatgattcctctcgtgaatttcgatactattctcatttcatccatgctccttttactcctttcaaagcttcagtttttcataaaaggaactgttattttggcgaaaaagaagagacgttgttagcgtctccgtctcttttgggtatgtaactcataaattcccaaggtcaatacaatggttgctattactatacctacgatggcaacaatcataccaacagcactccaaaatatccacgccgtcaaagctccgataatactaatcagtaaaatcgaactagccgtagcgaaatacttaagaacaccaatcgcataatcagttacttttccgatagatacataagtttcaatcatttttctttctcctttatgtgaaattatttagttccttttccataaaagtctttgtaaaaaatgcgctcaaatctcacgtctatcgaaacacgtttcccatcgctgacgctgtattggtttcatttttaacgcccacattatttgtcttatagtgaccgttggatataatccttccgtacactctccggatcggctgtcgaaatattccttgaattttggatgtaaatataaagagtctgtcagccatgaatcgacctctgtccaatatgtactttttgtatctgcactaaatcgctgctggatcactgccagacctttattccctatcgtaaatagagtgcagcgatcatacacaggatgattacaaatgtaaagttcgccgtacattgacaaataaatgtctggcttttgataatggtaccgcatttctatctcctcatagcaaaaagaaaagagccttagatttctctaagaccctctcccacttagcttatgtttttaatcgtctgaatcttcctcggaatcatcattcgcaatgcccaatacttcttctctggttgggtataagttctcatattcttcattgccttcgcggccgtaatcatctaaatctatactgtggccgcagtggggacacaccagcgtatcttcccactcatcctcgaactccattaaatgcccacactcatgacagatatactctctgctgaacattgctttaatttgctcctcgttaaaaatactcatagctaaatatctcctttcgtactgtccagctcccatacatatagtatacaagctgttgtctgtagttcaagagataaagctttattctctcataatagcccttgcatttttcacgagaaaaaacgaagaggacatgcgttacacacgtccccaacgtttcagaatttcctctctacttctttgtaggtctaaaacggttgattaaccctttgaatgttgaagatgtgaaggttccagtttcttcaaacttaaatcctttattcatccagatgccataacacatcaacggaatcaataattctgccgctgcaataccaactctgaaatatcgatccttaacctgctctgcgatctgccgctctttgaagtcgccatctttcgtaacagactcttcgtccatcatacgccgattgtacttctcatcagcatcccacacactcttgttctcttcgattctcagcttgtaaagctttgtcagatcatcaatcgctgttgatttttctttgcttccggactgcaaatcagataaagcctcaatctgtgctgcaatctcctcacttaataattcttcgatgtttttctcttccatttcgttctcctttcaaataattattaggttcattccataatagagagtgttatttgtgcgaaatataatttttcagctccactcgcaaacgtacgtaacgctgcttataaattgcatccgcgccagaccgatctaattcgagaaataaataaggtccgctatctggatctgattcatcgaccctaagcgaaccaaccggtttttccctgaatataaatcgagacaataacactccacccattattccgatcagtaatccaatcatcaagctcacttctgctcctccttccaaaatgtttttctgaaaaataccacccggcaatttttcaaatatcaaaataacatgtttcacggtaacctacgtacggtatctaacctaggataaaaagaaagagccattgctggctcaatctttaaaagttttcaagtattttgtaggtaaatattcttgttttcttaagttcattcaataccttaattgcattggaataattactttcgccctctgtccaccaaatagtccagcctttcaaacgagccaaaacatatcgaagtccgaaatacttcaaagttgttttgctccaaaccaactgatataaatgtggaacgaaatatccagttttagctccttctgcgcctttaattgcgataaacttacacatatcaattccctcctaaaatatattcttttcataaagggagttgtaattattgcgtgttctcaccttcgtacaccgttttcttccgaagatcagaccatgtaatataacggtccttcttgcatactgggcaaaagaatttgctaatcttcccaccgatatcctcaaattccttactttcgccctcaagtcggctctggcaatttggacagttgaaccggtataccttcttcacagctttatcgacaatcttcatatcatttccgctccttgttaagtaaccagaaaaatcgtctgtacaattcgtagtaaacatccttgcagcatggaatttctaatctagctttgagaatgtcataggaccatccctctgttacagcttttaaaatatactccgccagttctcgatcagtctgctctgcgactctctcgaccatatctgtacgctcagaataatatgtcttagccatggcgcattttgcagtcggatcaccaagcgtactggttactacgaacgatgccaaatctttcggcggattagagtacccatcaagaaccgaataagcttttctccagattggatactgaagacagaaatgtttaagctcgtaataacggtgcttctctatccaataaggattcttttcggatagctccggacgtattgttgttcccattagcgcttctcccctttccacacataaccagtctcctcgtacaagcgcttcggtgaaatataaaaattgatacgtccgtacttagaattcatgtcctcaatttttgtcactaactgaccattccttgtggcttttccgattggcaaccatccagatataataccggccctaacccatgacgcgtctttgccgtaaattcgtgccgcaaccattaccggaaccgagccagttgcaaattcattttcattcattggctgctacctcctttcaacggctattctaggttaggaacagcatttagtaaaaacaacctcggtggatatgagcaaaaagaaagaggctttgctaagcccctgttctcattttgttaaaccgtagtttctgtaaccgaatacgcattacagtcaattcctttccgatgttttcctgctgacgataatccttacttctcaaaagcatatcctcgaaaaatcgaattttattcagcagatgtctttcttctacactcatatcgcacctccgtaaatatgtattctattcataaaagcagttgcgatttatgcgccttccaacgtatcatagtcatctcacatggataatcttcatatccaaaagtctcgcaagtgatcagtccctctataacaccggctattatttccgattcgtattgcttgtatgggtaaatataatctgggagataccgatgtatacatccgcattcggagcattgatacctcggaacattcacccatttgctcacacgacctttcgtccgtacaattcttctaactttgtcatagtatttcaattttccaccgcagtcctggcaggttgatgtattgttactgatcatatacctaaccctttctatcctaggttaaaatataaaaatttagtgtaggagttgacaattcctacactatgatatatgattactaacgataaatcaacaatccaacataaaatctcggttcattatcatgaggagggatttaatatgctgatacaatgcccggagtgcgacttacaggtaagcgataaagcaaatacctgtccgcattgtggatacccgctgaaaccagacgcaaagcccaaatcgtctcgtaaaccaaataagcgcaggcggcttccaaacggtttcggtcaaataagtgagattaaaggtagaaatttaaggaaccctttccgtgcaatggttacggttggaaaggacaagaatggcaaaccaatatgtaagccgttgaaaccggagtcatactttccaacatacaatgatgcatacacagctcttgtggaatttaataagaatccgtatgacctggaaccgtctatcacagtcaaggaactgtacgacaaatggacaccggaatatttcaagactctgaagagtgacgacagcgccagagctactacatcggcttggcaatactgctctgctgtttacgatatgcgagtcatggatgttcgagcaaggcacataaaaggctgcatggaagaaggtgttgctaccgtaagaggccaagagcagacaccaagcgcatcaatgaagaataagataaagacgctcttcaatcagatgctcgactatgctgttgaatacgaacttgtagatcggaactattcgagaacattcaagcttacagacgataccattaaagaaatacagactgtcaagaaagaacacattccattctctgatgatgagatggctcttctgtggaagaatctcggacataaatatgggattgagttcatgattattcaatgctattctggatggagaccccaggagttaggtctgatagaattagcagatgttgatttatcgaactggacatttaaaggtggaattaaaaccgatgctggtgaaaacagagttgtaccgattcatcctcggataagggacttggtttccaaatcatacgaagaggctgatcaacttgggagcaaatatcttttcaattatacagatgaagatcgccgcggtaaaaataccaagttgacatacaatcggtatagcaaaatattcaatcgcattcgggacgagcttaaactcaacccggatcatagacctcacgacggcagaaagcatttcgtaaccaaatgcaaagatgctaaagtcgatgaatacgctatcaaatatatggtcggacataagatttcagatatcaccgaaaaggtgtatacagccagagaatttgaatggctcagaactgaaatagaaaaaataaaatgacttgtatttgacgctcaaatataggaatagcggtataggagtagtgcaggaataatgtatgaattacctacattttcccactttttactactcttaaccgcttcataattccttgattttactggattttctcggtataagccacctaacaagtttctattaataaagattaacaatgattttaaattcatttatttcttccttctttttagagcccgataatcctcccagaatcgcaccgacaccaccaaataataatcctcccaccaaggcgctacctacacctacagacaaaactccaataccatttttttgacattcataattaataatatcgccatatgtgaaatacagattcccgtatgattttaatttccacagcctattttgttcatcaataagaagttctttttcaataactttagtttgatgaaatattctacttctctgttgatttatttcattgtcattaatagcatcttttactctttttagaaaaatatctttccatgaaagtgtaattaaacataccccgcatttaacaatacaatccttgcaaacatatccatctgctatctgcttaacacctttctgtccaccacatatagaacaggcttccttattacccccaaacagtcccatccccaatacctccacgccataataatctatcctcattatagcgtggattagaaactttttctacctttttctttgtgtcaaaaaccaacaatcaataattgtgttagttcatccatagcaaaagcacctggatttctccgggtgctctgctttataattcaattctttttattggatgcttttcttcaatgtttatcactttaggctttaattcatccgatatctgagcacatcctaatgtattaggcgcactaacaaagataattgtttgctcatccgtattgccctgatacttaagcattatagtccctgtaaccagacgtttttgcttcgttttcggtagagcgccaacaatcgcacccggaataccaaaaacagccccaccaatcatccccttcaatacgctaccattttgaatgctattttcgatttcaacatccattttgtattcataggaaattatattacctattttcagaatgaactcttgcccattgcacataattgaaagtgtatcttcatttgcaataatggaacatgggcttccttctgccacacctaagccaaccgcaatatatatatccttgaattcctttggatacttattttttttcccaaacagtcccatcctcactacctccaccctataataatctatccccattatagcgtggatggtaaattatttctacctttttctttgtgtcaaaaaccaacaatcaataattgtgttagttcatccatagcaaaagcacctggatttctccgggtgctcttgttacctcatatttctaaaacatcgtttttatcaatgctttgtaaaatttgtcatctacctctaacaaactgttctttccatctttaaactttatagcaactgtataaattcctttattctttgctgatagtcctgccaataatccgactggtcccaacaaagtagctcctacagctcctctaataactccactggcagcactctttctctgctcatctgttattagttcatatgcttcaatattttgtttatttaaatacattggctttccaaaagatgtagcaatatataattgccccaaactaacccctgtcatcttaccaatataatcaccagcaataaccttattttgtgctcccatcctcaatacctccacgccataataatctatccttattatagcgtggattgccaattatttctacctctttcttttactcttggccttctgtgcctctttcctgtcatgctccagcttagtttcaacagatgcaatcacgacagccttttcgtatctatccaaagccaggaactcatgcggccacttatgcagcttatggaggcaatagtaagcaagattcgcttccatatcgcccccatcaattagttttttacatcttcaaccagttcttccattggcacatcgaatccgttgacttcctgcaccctctccagataattagcatactcccccgctgtcagcatagctttcaaaagcgtatccgcccccatcacatgataggagtcctggagttctttatcattgagattcggaaataccgtacatttagatgccagtttccccagatactgattatagtctgtttcctgggtatactgtccctttttaccaactaccggcacccttttagtacactctcgtcttaacgcctcatcttcggttgatgtgatggactgtatttcccattccattggccttcctgccttatccagaaagcgccttgataccacatgctttacgttttccgccttgactgcgttctgcgctaaaaaacagcttaaatctcccattttctcttatcctctctttcttactgcattccctgcaagtgactaaactgctctggcatctcccaatcctcgaaggtaaaatcaaggtcttcgtccagatactctgcatccgcatcgaacttcgccaagattcctccgtccacgttacaatccttcaggatgatggtctgccgtcccacactggaagtcgggtcttcattggttatctggatatcaaaatacacgtcctgtccagtctccttgtatcggtacaactgctccctgaagatgctggtattgtagtggaaggtcgcggacccgctccccttccagccggttgtcttatttccttttccggtcctccccagaatagggatttcagactttgttttctctatgctggcctccaggttaatggcctgcataaaattatagcggttcccttcaatcgtgacaaaacactccgccagggatgcactcacggcatcctttgcattcattgactgcatatatgtacctccttccttatgaaacaaccactgtcatatataattgtgacatacagttaatcggtgtcactgggcaattcaccaccacagaccgcttgctgttcccgcgctctaccgtgatttctttggactccacggcctcaatcgcccgcagccttgccagttctttattgtaggtcacaatgtcattccagaggctcacccgacccgcatcatcatttggcataatgcccagatactttgtattgaacatggatgcgatatcattccctatctgatccaggacgcgcacagtctgattattcgaaaaatcttccttcttctcttccgtaaaggtcaccaatgtgttaatatccatcaggactcgcacatcatcacctacgcgatggaacatgaattttcccgaacggacagccctcgcaagctgttcctgcgtgtaatccacatccaccgtgagttcaccgtcgtatacgcggttctcgttggtcttgttaaccgcacatgccgcctgaaccccgcaggtccagtacacaagcccctgctccagctctgccgccttgttctccacggatatgattccctcatagtccgcatcagccatgcggtacatcactgtttggaacttcacgccggcctcgtcgcgcatccgtctggtatactctgtaaatacagccttgactgcatcatccatggatgggcagcacaatgtctggaatgtataggactccatcttggccaagaactgtgcatagtcctctccgttgaccgcttccccgttcgtcccgccagtaaatgggattccagccgttgctgccagagttgcatccttcttgaacacaacgtacagattatccttgagctctgatgccgctgccacggtctggcggtccacctcctttttatcgagcatggttttcacatcaaacttcgtgctgtcgtccacattggcgctgatgaccagcatcaggtccttgccgcgtacaccactgtatttcgcctgtccataatcacaagcagccttaactcctccattgagccggtaaaagatacctttcgtcaggttcctgaataattccctgacctgccacatctgcggcgcatctgccggatacccgaatatctcctggcaccgctcctggtaatcctgggctgtcacaatgaaagcctccttttccgtcccccagccaaactccagagggattgccgccgtcccacggtctgatagtaccgcaacgctgctggcagcactcacaaaattgatataagccccgggaagtattttattctgaaccgtaaagcttccgcctcctaacatttatttcacctttcctttcatgaatttatctattaccgcatccacttctttcaatgaatacttcctgccatcttccagcagggcactcaccaggtccttctttccctggtagcactccgcctccagcagttcctgttttaaaaatgttgcttctccctgttttgtttctttcaattctcaaacctccttaactgtgtgttggcctccagcccctccattgacgcctcctgtggctccagttttatgacgaacatattgtaactgacaaagaaggtgagcacgccatcctctgtcctgtgactgcggccggtcccccgcagcaggcttccatcctctaatgtgatatactccagcccgtccatgaggatgtccgccgtccggttcatttcacgagagggctggggggtatcgccaggaagatactggatacacatagccgtctcacgataatatctctgtccaatcatcggcttttcagacggttccagaaactgcacaaaaaaacaaggctccttaaggccctgttctaccgcatctgtgtaaatttcataaccatcgccaaacagttcattcagccgcctggtgacagcatccatgatattattaagcatcgaacacctcccgaagttttgcttccagctttttctctatcagcttcggcgccaggtcattgatttctttttccgatatggtaagcatgaactttcccgggacccaagccttttttgcacttacgcctaaggctgggatatagcgcccaggtgtctgccgatgaccatattccacgtaggacgcatattcggtcgggttgataatttcaatctggtagctatcccctatcctctggatgtcacccaccgtccagccgcgccttaacgtcccgccctgatatccggcccagtattttcgctttataactccattctttgacagaaaggtccttgtcttaccatcggaaccctttacctttactgtcttcggtccatccagcttaggagccttgcctaccggtgttctctgcgtaactttcctcagcaggcgggaggctaattcctggatgcattcccggttgaaggcatccctctcctgctccagacgttctatctgcttttgcagcttctttatttcccgaaaatcaaaacttccgctctttgccattacgcatactccttccatatctccagaagaatctcttggtgggaggagtataccgcggccttaccactctgagcataactctcggtccggccctgctgggtgacctcaatccggctgcctgggggaatcacaggctccggatccagaaacaacttgatggtctgtgccacacccgtaaccgtatcactgccggccgccggcgccgtactggagtaagacaaatggcaggctataccatcctgtacaagggcctcctcctgcctcgtcacctttgtcacagggtctcttatgggcttcatgccgtaaatcctgcatgttccatcgtaagtggcctctatggccttcctgtgcatcctctgtgcctgtttgattgtctcacttaccattctaccaccccagcttcctgtaccggttaagctgcccctggtaatccttcaggataccgcctgataaggcatccaccgcacttgtaaagctggtggatgtgtccccttccgatatggatgatacccgggccggcgcctccccatccccgggacgctcataccggtacaggtctattgccatccgatatgatgtgctggtcaagcctgccggaactgcttttaagttgcagtagttccggatagtctcatccacatcctccataaggaactgcagggcgatgtcctgcgttgtgtcgccttcaggtatccccaataacgccttcagcttcattaggtccatggcccctccttacgaaatggtagcaatgaatacctggtctgcatacgggaacgacggcatggccgtggcaactgccttaatccaccggccgacagggtctaccgtgtcatattgtaccaccacgatgttccccacagcagacacatccacatccggattcttacggagctccagctcctcagccgtaaggccatagaatgtatcccccagtttcccatccggcatcataatgaatgcagattccggaaggaagcgcgcggacgaatatttcccctttgcatcctgctggcggtactgtttgtcataaatggcaatctgcggcaggctctgctgggccaggaaagcattcagctccgccctggtaagcacccggtcactgttcacaccgtagattgcagcgcgtatcctgtggtcccgtaaaatgcggttcagattggtcttggatgtcaatgcccgtgttggtgtgaacccggtgtcttttacaatccggtccacaaaggcatccatatcctccaggatagtggggtcaccgctcccccatgtcttatcagccttatgcgtgctcgggattccataatcaatgcttgccttgaagccgttctcattgatggaaagctttcctgtggacagggcttccattctcagacactcgaccctggttttcactcccgccaccaggttatccacgtcactgtaaatcttccggaccatctccgcctcttcctggtcattcctggggctttcaagggcaataatttccttctcgcccaggcggattctcctcttgataagggccaggtcctgcatgctgtaatcagcgccttctctggagcccagttctgtctccgtatcaaacgcatgaatatgggcagatacaggaaggtcggacgcacccttaatcatcttaatttccattgcttcggtcttacgttccggaaaaagcaactcacccatataggcttcggtctgcctttctttcgtataatcaatcagctcctgtggtgttaataattcttctactcttggcatgtcttaatcctccttatactgtgggtgtggcagccttgacctgcaggctcccatccacaaaaaatttaataaatggcatctttttcaccatctggtccacagcatcaaccaggtattccccctgcagccgctccgtgttgacggaaccggcaatcatcagggccccagcctgctgtccgtatgtgacctcagtggttgcgaaaagaatgccaacgggttccgtggaaaatgtgtacgtataagccccggagctcccgctgcgcgcaacctttaccacctttccatccttgtccagcaggctgcctgccagaacaaattttttcccttcggcgtccgctgtcaccccggtgtccagtaccgtacaggtgatgttctcataatactcattccgcagaaactccggagaattatcgtacgtcttctttactaaatacatgtcatttcctctctttctctattttgttgcccatgcatccgcataggggttttttgaggtttctttgttcaggctctccgccactgtcttggcccatccaccctctgatgtctcgccggccttgggtttataaccggtttttccgcttccctgcctgacggccgcaggagtagaatccttgaacaggaacgccttaccttccttcagtgccttcacctgttcttcaaggccagtgactttcccgtcgtcccctaggagcagcttgcttttatcaacaagtccggacacaaggtcagcgtcatgggcggagtcaccgattgcaagtttgatggcggtggtcagcttcagttccttcatatccgcctcatatttctctttggcagccttattctctgcctgcaggtccgtaatctgtttctggagctcctcgctgctgccactggccttcttcagttcctccaattgtttgtccctggtcttgatgtctttctccagttggacctttgtggcgttgagggcctccaggtccgttttagggacgtagccctccaactccttctttgattcccgctccgctttggatgccagctcctcgctgatgcccagagcgacaaaatcttcttttttcatagtctcttcctttcttttggacgtaaaaataacacccgggatagtcccgcgtgctcatttaaacttagttatttcaattatcgcgacaaaataaaataccaccggccctttgctgactggtggtactaataccacatgactaatttctcatctggcatattcttttcccttgataattttaacaactcgatttgtgcgtggttaacatgatttctacaccactcatatccctctggcaggctgtattcacgaagattaccggaagctatgtcaactaccacatgccctttttgcttactatcttccggaataatgtcacattctatgacacggttattcctttttatattttttaattttagcatagaatttactcgcctccttgctgtaattatattccgctgatgtcagtctatgtgcttcatcctgactgtatccttggcctattaattccttttccttaatctcatgctttaggagcgtcagatcgtgcgactccggttttccatcaatcagtcttctccacgattcggccatcatataatcgggcgcgaaatattctggttctgggccgcccaggtcatgcttatccaagaaaataaagttcttaatctcctgaatctgctcctctgaataacctgttgattttgcgattttaggaacatcggttttcatactccgtacaagcccgtagtatctttctgcatgatctttcgcagcatttccattcggattcctcgccccgcttactgctcctgacttcattatatcaggttctatctgcatttcaacaacaaaccgcttttcccactcccggtacttcatgtccgccggaacataatatgtctttccgtccccatccctagcagcccgctgttccccttctgtaaactcatcgtcaaagtacggcaccgtggtggacctgcaattggggtgaaaaggcggtgctgtaatgcccaccttgtaatccttcatgtcaaagaccttaccgtccatatccctgcatatttcagaggtttggccgtccagcgtggccagaatctcatacttctccactcccagttccttcaagcagtccttttgagccgccgatgagatggccgcggattcagtcatgatgaggcgcccggcctgactccgactgacctccatggtctttgacaggctgtctacggctttctgaggagactcaccacggatgatgttctgcgtcagctcagtatgcaggtttctgactaatttatccttatttgtccagatacggctcgagaagtcctccccatcctgcgcccatggccttttgatgacagcttctatcttcctgccatccagccgggccagattggttcctgccccggtccctttcgccacctcaaaagcggttcggtaatactgctccccataggccttatgcaggtaatccgtcatccccccctcgaactccgttgataacagctctgcgtgctgctgcatctgaagcttcattgcctccaggtaggatatatggtggcgagcggatgcattctccagttccttcatccagcgctggtcaactgcattttcctctccggcttttatgtaatcctcgactgtccacttgaactcttccaactcattcttcttaagcagcttcttggcacccgcataactgatgtcattgttgtctgccagacgctggtaccaccggccaatgtccatctggatactgttggtggctcttatgtactggcgctggacatccttgtaataggctgcgctgcgctggtactggtcatcctccagggaagccatgcgttttccccaatagtctgtatttttagccgtggagcacacctcctctcattgcattctctccccctccaggctatactatacttacaggccctgcccaggctgagtacataaagaaaggagattttcctatgaatatgattccagtttcatcatctaacatctcgtccattggatacgaaggaacaactttatatgtacgctttaactctggggggttgtacgcatattatgatgttccacaatctgtatacagtggactgatgtcagcttcctcacatggtaagtatttagctgcttacataaagggacgttaccgatatcagcaaattagttaatcggtaatcataagaatcacagcagggccttccactgaaatatcctttaactggtaaggctctgcaataatttttttcacgccctcccgcctttctaattctgctaccaactcacaggtcttaagttctctgttctccatcttcttcaccgccttcctctttctcctgttttccctgctgcttgaatgccagctggtacaaatctaccttctgcgcattttcatcttcttccttcttcagctgcttttcttcctcctctgcattttccacccatggatgattcttaagaatggtcttatgggagatgacgcccgtgctttttgtagcgatgtcagccagttccgattcactccggatagccgtcctggtccatgtctgcgttatctgcttacactcggcccccagatgatgacatatggcccgtaccaaccggccaaaccccagcttaaactccgtctccatcaggcccgccttcagctccaaaagggagtacaggtatttcagtgcttccccggaggtatttccaaacttctgcggatccggatccacacccattccctgttcaaagattgctttcctggtaatctccagaaatttctctctggcctctatcggaatactgatagtcaaggcctccacacctccgctccctccagcgccgtcagtctccaccttaattgccttatattctttcaattccgcaatgaaagacttaaggtcctggcccccatagttagtcagtataaatatgatttcctgcgtgtcctcgaggtcatttaaaaagccgctgaataccttgtcataggcatctgacagcagctttatattggttaaatcatctgtgggaatattattgttataaaatgggatgaatggcacctctccaaaaccatgctcaaacacattcgtctgctccacactctcatccggggagccggtcagctcatatgcgttatacggctccaaccctgtttcagaaatggaactgcttttctttttatacacatagcatttttctgccgtccaatactcccacacatagacggctttaccgtcaataacatccctggttttatagttccgtagcacggcatccagctggcggtccaagtccgcggaatagactgggataatctgctttgggtcaataaccccatacttccattgcccgtcatcatccttccagtagtgcagccacgccaccttgcagtttgaggcctttatgcataagtccttgcataccttggcgtatttatcccccagcaggtctgctatctgcctattcgccttttcatttcccacatcaaacagcggcggcgctgaaaacatataagcagccttctggttgaccagcaggccgtgaaagttccgcggtatccggttatccgcatttctcagcgggtcattatcccgtttcttccctataccaaaaagaatatcattcttattctcataataccgttctgccgccttggactcccggacaaaacgtcggtgccctgcggaatagctctttattagttcctttacaatatcaatcgtcatggcctgtggcatcccaccacctcctttactttaacactgagattccacccttccttgcacagttctctgcaatgcctgtcgtggcatccggggcatcatcatgcttgttctggccctcgcgctggtattttatcaatgcattatggtattctggccagcggtttttccagtcctccgggaaatatatatgttg
